(19) United States
(12) Patent Application Publication
(10) Pub. No.: US 2025/0034220 A1
(43) Pub. Date: Jan. 30, 2025

(54) EXPRESSION OF MILK PROTEINS, FAM20C AND RELATED GENES IN PLANTS

(71) Applicant: MOZZA FOODS, Inc., Los Angeles, CA (US)

(72) Inventor: Cory J. Tobin, Los Angeles, CA (US)

(73) Assignee: MOZZA FOODS, Inc., Los Angeles, CA (US)

(21) Appl. No.: 18/786,308

(22) Filed: Jul. 26, 2024

Related U.S. Application Data
(60) Provisional application No. 63/516,115, filed on Jul. 27, 2023.
(60) Provisional application No. 63/517,532, filed on Aug. 3, 2023.

(51) Int. Cl. C07K 14/47; A23L 33/19

(52) U.S. Cl. CPC C07K 14/4732; A23L 33/19; C07K 2319/00

(57) ABSTRACT

Compositions for expression of milk proteins in plants and co-expression of milk proteins and kinases in plants are disclosed herein. With respect to the disclosed composition herein, nucleic acids, which encode for the milk proteins and kinases, can be isolated. The milk proteins, which are expressed or co-expressed with kinases, in the plants, include: alpha S1 casein, alpha S2 casein, beta casein, and kappa casein. The kinases, which are co-expressed with the milk proteins, include: FAM20C and FAM20A.

### CROSS-REFERENCE

[0001] This application claims the benefit of U.S. Provisional Application Ser. No. 63/516,115, filed on Jul. 27, 2023, and U.S. Provisional Application Ser. No. 63/517,532, filed on Aug. 3, 2023, which are each incorporated herein by reference in its entirety.

### INCORPORATION BY REFERENCE

[0002] The present application is being filed along with a Sequence Listing in electronic format. The Sequence Listing is provided as a file entitled 716100USNP_SEQ_LIST.xml, created on Jul. 26, 2024, which is 1,480 kilobytes in size. The information in the electronic format of the Sequence Listing is incorporated by reference in its entirety.

### BACKGROUND

[0003] Casein micelles account for more than 80% of the protein in bovine milk and are a key component of all dairy cheeses. Casein micelles include individual casein proteins are produced in the mammary glands of bovines and other ruminants. The industrial scale production of the milk that is processed to yield these casein micelles, primarily in the form of curds for cheese production, typically occurs on large-scale dairy farms and is often inefficient, damaging to the environment, and harmful to the animals. Dairy cows contribute substantially to greenhouse gasses, consume significantly more water than the milk they produce, and commonly suffer from dehorning, disbudding, mastitis, routine forced insemination, and bobby calf slaughter.

[0004] Accordingly, there is a need for an in vivo plant-based casein expression system which allows for purification of biologically active casein proteins that is cost effective at industrial scale. A major impediment in making casein proteins and other milk proteins is the difficulty of expressing those proteins in plants. Solutions to these problems have been long sought but prior developments have not taught or suggested any solutions and, thus, solutions to these problems have long eluded those skilled in the art.

### SUMMARY

[0005] Some aspects of the disclosure provide nucleotide sequences for expressing milk proteins, for example, casein proteins, in plants and food products that comprise the nucleotide sequences.

[0006] Some aspects of the disclosure, with respect to expressing milk proteins, such as caseins, in plants, a nucleic acid molecule comprising a nucleotide sequence at least 85%, at least 90%, at least 95%, at least 96%, at least 97%, at least 98%, at least 99%, or 100% identical to any one of SEQ ID NO:1-SEQ ID NO:200. In some cases, the nucleotide sequence is between 72% and 80% identical to SEQ ID NO: 201. In some cases, the nucleotide sequence codes for alpha S1 casein. In some cases, the alpha S1 casein is a bovine alpha S1 casein.

[0007] Some aspects of the disclosure, with respect to expressing milk proteins, such as caseins, in plants, a nucleic acid molecule comprising a nucleotide sequence at least 85%, at least 90%, at least 95%, at least 96%, at least 97%, at least 98%, at least 99%, or 100% identical to any one of SEQ ID NO:202-SEQ ID NO:400. In some cases, the nucleotide sequence is between 72% and 80% identical to SEQ ID NO: 401. In some cases, the nucleotide sequence codes for alpha S2 casein. In some cases, the alpha S2 casein is a bovine alpha S2 casein.

[0008] Some aspects of the disclosure, with respect to expressing milk proteins, such as caseins, in plants, a nucleic acid molecule comprising a nucleotide sequence at least 85%, at least 90%, at least 95%, at least 96%, at least 97%, at least 98%, at least 99%, or 100% identical to any one of SEQ ID NO:402-SEQ ID NO:603. In some cases, the nucleotide sequence is between 72% and 80% identical to SEQ ID NO: 604. In some cases, the nucleotide sequence codes for beta casein. In some cases, the beta casein is a bovine beta casein.

[0009] Some aspects of the disclosure, with respect to expressing milk proteins, such as caseins, in plants, a nucleic acid molecule comprising a nucleotide sequence at least 85%, at least 90%, at least 95%, at least 96%, at least 97%, at least 98%, at least 99%, or 100% identical to any one of SEQ ID NO:605-SEQ ID NO:805. In some cases, the nucleotide sequence is between 72% and 80% identical to SEQ ID NO: 806. In some cases, the nucleotide sequence codes for kappa casein. In some cases, the kappa casein is a bovine kappa casein.

[0010] In some cases, with respect to expressing milk proteins, such as caseins, in plants, the nucleic acid molecule comprises a nucleotide sequence that is at least 70% but no more than 80% identical to any one of SEQ ID NO:1-SEQ ID NO:806. In some cases, the nucleic acid molecule comprises a nucleotide sequence that is at least 72% but no more than 78% identical to any one of SEQ ID NO:1-SEQ ID NO:806. In some cases, the nucleic acid molecule comprises a nucleotide sequence that is at least 74% but no more than 76% identical to any one of SEQ ID NO:1-SEQ ID NO: 806. In some cases, the nucleic acid molecule codes for alpha S1 casein, alpha S2 casein, beta casein, or kappa casein. In some cases, the nucleic acid is isolated.

[0011] In some cases, with respect to expressing milk proteins, such as caseins, in plants, the disclosed the nucleic acid does not comprise at least two, at least three, at least four, at least five, at least six, at least seven, at least eight, at least nine, at least 10, at least 11, at least 12, at least 13, at least 14, at least 15, at least 16, at least 17, at least 18, at least 19, at least 20, at least 21, at least 22, at least 23, at least 24, at least 25, at least 26, at least 27, at least 28, at least 29, at least 30, at least 31, at least 32, at least 33, at least 34, at least 35, at least 36, at least 37, at least 38, at least 39, at least 40, at least 41, at least 42, at least 43, at least 44, at least 45, or at least 46 of the sequences selected from the group consisting of GGTACC, ACCGGT, GGGCCC, GTGCAC, GGCGCGCC, GGTACC, CCTAGG, GGATCC, AGATCT, CACGTC, ATCGAT, TTCGAA, ATCGAT, CGGCCG, GAGCTC, GAATTC, GATATC, AAGCTT, GTTAAC, GGTACC, ACGCGT, CCATGG, CATATG, GCTAGC, GCGGCCGC, ATGCAT, TTAATTAA, CTCGAG, GGGCCC, CTGCAG, CGATCG, CAGCTG, GAGCTC, CCGCGG, GTCGAC, CCCGGG, TACGTA, ACTAGT, GCATGC, CTCGAG, CCCGGG, TCTAGA, CTCGAG, CCCGGG, GGTCTC and GAAGAC. In some cases, the disclosed nucleic acid molecule does not comprise GGTCTC. In some cases, the disclosed nucleic acid molecule does not comprise GAAGAC.

[0012] Some aspects of the disclosure, with respect to expressing milk proteins, such as caseins, in plants, provide a nucleic acid molecule comprising a nucleotide sequence at least 85%, at least 90%, at least 95%, at least 96%, at least 97%, at least 98%, at least 99%, or 100% identical to any one of SEQ ID NO:1-SEQ ID NO:200, wherein the nucleotide sequence is between 72% and 80% identical to SEQ ID NO: 201.

[0013] Some aspects of the disclosure, with respect to expressing milk proteins, such as caseins, in plants, provide a nucleic acid molecule comprising a nucleotide sequence at least 85%, at least 90%, at least 95%, at least 96%, at least 97%, at least 98%, at least 99%, or 100% identical to any one of SEQ ID NO:202-SEQ ID NO:400, wherein the nucleotide sequence is between 72% and 80% identical to SEQ ID NO: 401.

[0014] Some aspects of the disclosure, with respect to expressing milk proteins, such as caseins, in plants, provide a nucleic acid molecule comprising a nucleotide sequence at least 85%, at least 90%, at least 95%, at least 96%, at least 97%, at least 98%, at least 99%, or 100% identical to any one of SEQ ID NO:402-SEQ ID NO:603, wherein the nucleotide sequence is between 72% and 80% identical to SEQ ID NO: 604.

[0015] Some aspects of the disclosure, with respect to expressing milk proteins, such as caseins, in plants, provide a nucleic acid molecule comprising a nucleotide sequence at least 85%, at least 90%, at least 95%, at least 96%, at least 97%, at least 98%, at least 99%, or 100% identical to any one of SEQ ID NO:605-SEQ ID NO:805, wherein the nucleotide sequence is between 72% and 80% identical to SEQ ID NO: 806.

[0016] Some aspects of the disclosure, with respect to expressing milk proteins, such as caseins, in plants, provide a food composition comprising any one of the nucleic acid molecules disclosed herein. In some cases, the food composition is a dairy product. In some cases, the food composition comprises a plant molecule. In some cases, the plant molecule is a plant protein, sugar or deoxyribonucleic acid. In some cases, the food composition is cheese.

[0017] Some aspects of the disclosure, with respect to expressing milk proteins, such as caseins, in plants, provide a fusion protein, comprising a casein protein and a peptide sequence, wherein the peptide sequence comprises an amino acid sequence that is at least 85%, at least 90%, at least 95%, at least 96%, at least 97%, at least 98%, at least 99%, or 100% identical to SEQ ID NO: 808. In some cases, the casein protein is alpha S1 casein, alpha S2 casein, beta casein, or kappa casein.

[0018] Some aspects of the disclosure, with respect to expressing milk proteins, such as caseins, in plants, provide a nucleic acid molecule comprising a first nucleotide sequence that is at least 85%, at least 90%, at least 95%, at least 96%, at least 97%, at least 98%, at least 99%, or 100% identical to any one of SEQ ID NO:1-SEQ ID NO: 806, and a second nucleotide sequence that is at least 85%, at least 90%, at least 95%, at least 96%, at least 97%, at least 98%, at least 99%, or 100% identical SEQ ID NO: 807.

[0019] In some aspects, the nucleotide sequences, with respect to expressing milk proteins, such as caseins, in plants, provide codon-optimized for a plant, wherein the plant can be any one of the following, for example, angiosperms and gymnosperms such as Arabidopsis, potato, tomato, tobacco, alfalfa, lemice, carrot, strawberry, sugarbeet, cassava, sweet potato, soybean, lima bean, pea, chick pea, maize (com), turf grass, wheat, rice, barley, sorghum, oat, oak, eucalyptus, walnut, palm, and duckweed a well as fern and moss. In some aspects, the nucleotide sequences provided herein are codon-optimized for a plant, wherein the plant is a monocot, a dicot, or a vascular plant reproduced from spores such as fern or a nonvascular plant such as moss, liverwort, hornwort, and algae. In some aspects, the nucleotide sequences provided herein are codon-optimized for a dicot plant, include for example Arabidopsis, tobacco, tomato, potato, sweet potato, cassava, alfalfa, lima bean, pea, chick pea, soybean, carrot, strawberry, lettuce, oak, maple, walnut, rose, mint, squash, daisy, quinoa, buckwheat, mung bean, cow pea, lentil, lupin, peanut, fava bean, French beans, mustard, or cactus. In some aspects, the nucleotide sequences provided herein are codon-optimized for a monocot plant, including for example, turf grass, maize (corn), rice, oat, wheat, barley, sorghum, orchid, iris, lily, onion, palm, and duckweed. In some cases, the nucleotide sequences provided herein are codon-optimized for a soybean (i.e., glycine max).

[0020] In some cases, the nucleotide sequences, with respect to expressing milk proteins, such as caseins, in plants, do not comprise a nucleotide sequence that is susceptible to enzymatic digestion by one or more restriction enzymes. For example, the nucleotide sequences provided herein do not comprise a nucleotide sequence that is susceptible to enzymatic digestion by one or more the following restriction digestion enzymes: Acc65I (GGTACC), AgeI (ACCGGT), ApaI (GGGCCC), ApaLI (GTGCAC), AscI (GGCGCGCC), Asp718I (GGTACC), AvrII (CCTAGG), BamHI (GGATCC), BglII (AGATCT), BmgBI (CACGTC), BspDI (ATCGAT), BstBI (TTCGAA), ClaI (ATCGAT), EagI (CGGCCG), Ecl136II (GAGCTC), EcoRI (GAATTC), EcoRV (GATATC), HindIII (AAGCTT), HpaI (GTTAAC), KpnI (GGTACC), MluI (ACGCGT), NcoI (CCATGG), NdeI (CATATG), NheI (GCTAGC), NotI (GCGGCCGC), NsiI (ATGCAT), PacI (TTAATTAA), PaeR7I (CTCGAG), PspOMI (GGGCCC), PstI (CTGCAG), PvuI (CGATCG), PvuII (CAGCTG), SacI (GAGCTC), SacII (CCGCGG), SalI (GTCGAC), SmaI (CCCGGG), SnaBI (TACGTA), SpeI (ACTAGT), SphI (GCATGC), TliI (CTCGAG), TspMI (CCCGGG), XbaI (TCTAGA), XhoI (CTCGAG), XmaI (CCCGGG). In some cases, the nucleotide sequences provided herein do not comprise one or more of the nucleotide sequences in the list above. In some cases, the nucleotide sequences provided herein do not comprise any of the nucleotide sequences in the list above. In some cases, the nucleotide sequences provided herein do not comprise a nucleotide sequence that is susceptible to enzymatic digestion by Eco31I (i.e., BsaI, Bso31I, BspTNI) or BpiI (i.e., BbsI, BpuAI, BstV2I). In some cases, the nucleotide sequences provided herein do not comprise nucleotide sequences GGTCTC or GAAGAC.

[0021] Some aspects of the disclosure provide nucleotide sequences for co-expressing milk protein with a kinase (for example, FAM20C) to improve the expression and function of milk protein in plants and food products that comprise the nucleotide sequences.

[0022] Some aspects of the disclosure, with respect to expressing milk proteins and kinases in plants, a nucleic acid molecule comprising a nucleotide sequence at least 85%, at least 90%, at least 95%, at least 96%, at least 97%, at least 98%, at least 99%, or 100% identical to any one of SEQ ID NO: 814-SEQ ID NO: 920. In some cases, the nucleotide sequence is between 74% and 78% identical to SEQ ID NO: 921. In some cases, the nucleotide sequence is between 74% and 77% identical to SEQ ID NO: 921. In some cases, the nucleotide sequence is between 74% and 76% identical to SEQ ID NO: 921. In some cases, the nucleotide sequence is between 74% and 75% identical to SEQ ID NO: 921. In some cases, the nucleotide sequence is between 75% and 78% identical to SEQ ID NO: 921. In some cases, the nucleotide sequence is between 75% and 77% identical to SEQ ID NO: 921. In some cases, the nucleotide sequence is between 75% and 76% identical to SEQ ID NO: 921. In some cases, the nucleotide sequence is between 76% and 78% identical to SEQ ID NO: 921. In some cases, the nucleotide sequence is between 76% and 77% identical to SEQ ID NO: 921. In some cases, the nucleotide sequence is between 76% and 78% identical to SEQ ID NO: 921. In some cases, the nucleotide sequence is between 76% and 77% identical to SEQ ID NO: 921. In some cases, the nucleotide sequence is between 77% and 78% identical to SEQ ID NO: 921. In some cases, the nucleotide sequence codes for FAM20C. In some cases, FAM20C is a bovine protein.

[0023] Some aspects of the disclosure, with respect to co-expressing milk proteins with kinases, a nucleic acid molecule comprising a nucleotide sequence at least 85%, at least 90%, at least 95%, at least 96%, at least 97%, at least 98%, at least 99%, or 100% identical to any one of SEQ ID NO: 922-SEQ ID NO: 926. In some cases, the nucleotide sequence codes for FAM20A. In some cases, FAM20A is a bovine protein.

[0024] In some cases of the disclosure, with respect to co-expressing milk proteins with kinases, the disclosed the nucleic acid does not comprise at least two, at least three, at least four, at least five, at least six, at least seven, at least eight, at least nine, at least 10, at least 11, at least 12, at least 13, at least 14, at least 15, at least 16, at least 17, at least 18, at least 19, at least 20, at least 21, at least 22, at least 23, at least 24, at least 25, at least 26, at least 27, at least 28, at least 29, at least 30, at least 31, at least 32, at least 33, at least 34, at least 35, at least 36, at least 37, at least 38, at least 39, at least 40, at least 41, at least 42, at least 43, at least 44, at least 45, or at least 46 of the sequences selected from the group consisting of GGTACC, ACCGGT, GGGCCC, GTGCAC, GGCGCGCC, GGTACC, CCTAGG, GGATCC, AGATCT, CACGTC, ATCGAT, TTCGAA, ATCGAT, CGGCCG, GAGCTC, GAATTC, GATATC, AAGCTT, GTTAAC, GGTACC, ACGCGT, CCATGG, CATATG, GCTAGC, GCGGCCGC, ATGCAT, TTAATTAA, CTCGAG, GGGCCC, CTGCAG, CGATCG, CAGCTG, GAGCTC, CCGCGG, GTCGAC, CCCGGG, TACGTA, ACTAGT, GCATGC, CTCGAG, CCCGGG, TCTAGA, CTCGAG, CCCGGG, GGTCTC and GAAGAC. In some cases, the disclosed nucleic acid molecule does not comprise GGTCTC. In some cases, the disclosed nucleic acid molecule does not comprise GAAGAC.

[0025] Some aspects of the disclosure, with respect to co-expressing milk proteins with kinases, provide a plant comprising any one of the nucleic acid molecules in any one of SEQ ID NO: 814-SEQ ID NO: 920. In some aspects, the nucleotide sequences provided herein are codon-optimized for a plant, wherein the plant can be any one of the following, for example, angiosperms and gymnosperms such as Arabidopsis, potato, tomato, tobacco, alfalfa, lemice, carrot, strawberry, sugarbeet, cassava, sweet potato, soybean, lima bean, pea, chick pea, maize (com), turf grass, wheat, rice, barley, sorghum, oat, oak, eucalyptus, walnut, palm and duckweed a well as fern and moss. In some aspects, the nucleotide sequences provided herein are codon-optimized for a plant, wherein the plant is a monocot, a dicot, or a vascular plant reproduced from spores such as fern or a nonvascular plant such as moss, liverwort, hornwort and algae. In some aspects, the nucleotide sequences provided herein are codon-optimized for a dicot plant, include for example Arabidopsis, tobacco, tomato, potato, sweet potato, cassava, alfalfa, lima bean, pea, chick pea, soybean, carrot, strawberry, lettuce, oak, maple, walnut, rose, mint, squash, daisy, quinoa, buckwheat, mung bean, cow pea, lentil, lupin, peanut, fava bean, French beans, mustard, or cactus. In some aspects, the nucleotide sequences provided herein are codon-optimized for a monocot plant, including for example, turf grass, maize (corn), rice, oat, wheat, barley, sorghum, orchid, iris, lily, onion, palm, and duckweed. In some cases, the nucleotide sequences provided herein are codon-optimized for a soybean (i.e., glycine max).

[0026] In some cases of the disclosure, with respect to co-expressing milk proteins with kinases, the nucleotide sequences provided herein do not comprise a nucleotide sequence that is susceptible to enzymatic digestion by one or more restriction enzymes. For example, the nucleotide sequences provided herein do not comprise a nucleotide sequence that is susceptible to enzymatic digestion by one or more the following restriction digestion enzymes: Acc65I (GGTACC), AgeI (ACCGGT), ApaI (GGGCCC), ApaLI (GTGCAC), AscI (GGCGCGCC), Asp718I (GGTACC), AvrII (CCTAGG), BamHI (GGATCC), BglII (AGATCT), BmgBI (CACGTC), BspDI (ATCGAT), BstBI (TTCGAA), ClaI (ATCGAT), EagI (CGGCCG), Ecl136II (GAGCTC), EcoRI (GAATTC), EcoRV (GATATC), HindIII (AAGCTT), HpaI (GTTAAC), KpnI (GGTACC), MluI (ACGCGT), NcoI (CCATGG), NdeI (CATATG), NheI (GCTAGC), NotI (GCGGCCGC), NsiI (ATGCAT), PacI (TTAATTAA), PacR7I (CTCGAG), PspOMI (GGGCCC), PstI (CTGCAG), PvuI (CGATCG), PvuII (CAGCTG), SacI (GAGCTC), SacII (CCGCGG), SalI (GTCGAC), SmaI (CCCGGG), SnaBI (TACGTA), SpeI (ACTAGT), SphI (GCATGC), TliI (CTCGAG), TspMI (CCCGGG), XbaI (TCTAGA), XhoI (CTCGAG), XmaI (CCCGGG). In some cases, the nucleotide sequences provided herein do not comprise one or more of the nucleotide sequences in the list above. In some cases, the nucleotide sequences provided herein do not comprise any of the nucleotide sequences in the list above. In some cases, the nucleotide sequences provided herein do not comprise a nucleotide sequence that is susceptible to enzymatic digestion by Eco31I (i.e., BsaI, Bso31I, BspTNI) or BpiI (i.e., BbsI, BpuAI, BstV21). In some cases, the nucleotide sequences provided herein do not comprise nucleotide sequences GGTCTC or GAAGAC.

[0027] In some embodiments of the disclosure, with respect to co-expressing milk proteins with kinases, the provided DNA sequences contribute to new protein folding patterns compared to wild type, due to the impact of codon changes on the rate of protein synthesis. In some embodiments, changes in codon usage enhance the stability and localization of mRNA, optimizing the quantity and positioning of protein synthesis. In some embodiments, the variability of tRNA availability across organisms aligns with the introduced codons, prompting unique translation dynamics. In some embodiments, the modified codon usage enriches traditional patterns of gene expression by affecting the regulatory sequences of DNA and RNA. In some embodiments, changes in codon usage provide an additional dimension to post-translational modifications vital to protein function by introducing alterations in translation speed and timing.

[0028] Some aspects of the disclosure, with respect to co-expressing milk proteins with kinases, provide a composition comprising any one of the nucleic acid molecules disclosed herein. In some cases, the composition is a food composition. In some cases, the food composition is a dairy product. In some cases, the food composition comprises a plant molecule. In some cases, the plant molecule is a plant protein, sugar or deoxyribonucleic acid. In some cases, the food composition is cheese.

[0029] Some aspects of the disclosure. with respect to co-expressing milk proteins with kinases, provide a food composition comprising any one of the nucleic acid molecules in SEQ ID NO: 922-SEQ ID NO: 926. Some aspects of the disclosure provide a food composition comprising: a casein protein or a DNA coding for a casein protein; and a nucleic acid molecule in any one of SEQ ID NO:814-SEQ ID NO:926. Some aspects of the disclosure provide a food composition comprising: a first nucleic acid molecule in any one of SEQ ID NO: 814-SEQ ID NO: 920; and a second nucleic acid molecule in any one of SEQ ID NO: 922-SEQ ID NO: 926. In some cases, the food composition further comprises a casein protein or a DNA coding for a casein protein. In some cases, the food composition is a dairy product. In some cases, the food composition comprises a plant molecule. In some cases, the plant molecule is a plant protein, sugar, or deoxyribonucleic acid.

[0030] In some cases of the disclosure, with respect to co-expressing milk proteins with kinases, the composition does not comprise a detectable amount of α-lactalbumin. In some cases, the composition does not comprise a detectable amount of β-lactoglobulin. In some cases, the composition does not comprise a detectable amount of α-S2-casein. In some cases, the composition does not comprise a detectable amount of lactoferrin. In some cases, the composition does not comprise a detectable amount of transferrin. In some cases, the composition does not comprise a detectable amount of serum albumin. In some cases, the composition does not comprise a detectable amount of lysozyme. In some cases, the composition does not comprise a detectable amount of lactoperoxidase. In some cases, the composition does not comprise a detectable amount of immunoglobulin-A. In some cases, the composition does not comprise a detectable amount of lipase.

[0031] In some cases of the disclosure, with respect to co-expressing milk proteins with kinases, the composition is free of α-lactalbumin. In some cases, the composition is free of β-lactoglobulin. In some cases, the composition is free of α-S2-casein. In some cases, the composition is free of α-S1-casein. In some cases, the composition is free of β-casein. In some cases, the composition is free of lactoferrin. In some cases, the composition is free of transferrin. In some cases, the composition is free of serum albumin. In some cases, the composition is free of lysozyme. In some cases, the composition is free of lactoperoxidase. In some cases, the composition is free of immunoglobulin-A. In some cases, the composition is free of lipase.

[0032] In some cases, the composition, with respect to co-expressing milk proteins with kinases, is essentially free of α-lactalbumin. In some cases, the composition is essentially free of β-lactoglobulin. In some cases, the composition is essentially free of α-S2-casein. In some cases, the composition is essentially free of β-casein. In some cases, the composition is essentially free of α-S1-casein. In some cases, the composition is essentially free of lactoferrin. In some cases, the composition is essentially free of transferrin. In some cases, the composition is essentially free of serum albumin. In some cases, the composition is essentially free of lysozyme. In some cases, the composition is essentially free of lactoperoxidase. In some cases, the composition is essentially free of immunoglobulin-A. In some cases, the composition is essentially free of lipase.

### INCORPORATION BY REFERENCE

[0033] All publications, patents, and patent applications mentioned in this specification are herein incorporated by reference to the same extent as if each individual publication, patent, or patent application was specifically and individually indicated to be incorporated by reference. To the extent publications and patents or patent applications incorporated by reference contradict the disclosure contained in the specification, the specification is intended to supersede and/or take precedence over any such contradictory material.

### DETAILED DESCRIPTION

[0034] The following embodiments are described in sufficient detail to enable those skilled in the art to make and use the invention. It is to be understood that other embodiments would be evident based on the present disclosure, and that system, process, or mechanical changes can be made without departing from the scope of an embodiment of the present disclosure.

[0035] In the following description, numerous specific details are given to provide a thorough understanding of the invention. However, it will be apparent that the invention can be practiced without these specific details. In order to avoid obscuring an embodiment of the present disclosure, some well-known techniques, system configurations, and process steps are not disclosed in detail. Throughout this disclosure, various publications, patents, and published patent specifications are referenced by an identifying citation. The disclosures of these publications, patents and published patent specifications are hereby incorporated by reference into the present disclosure.

[0036] In the compositions herein, nucleotide sequences for: (i) expressing milk proteins comprising: alpha S1 casein; alpha S2 casein; beta casein; and kappa casein, in plants and food products that comprise the nucleotide sequences for expressing casein are disclosed; and (ii) nucleotide sequences for co-expressing one or more of the milk proteins comprising: alpha S1 casein; alpha S2 casein; beta casein; and kappa casein, with a kinase comprising FAM20C and FAMC20A, to improve the expression and function of milk protein in plants and food products that comprise the nucleotide sequences.

[0037] The compositions herein comprise SEQ ID NO: 1-926, which can be nucleic acids that are isolated, codon optimized, and integrated into a plant cell, OR a fusion protein, wherein: SEQ ID NO: 1-SEQ ID NO: 200 and SEQ ID NO: 809 are each a nucleotide sequence encoding for alpha S1 casein; SEQ ID NO: 201 is a nucleotide sequence encoding for wild type alpha S1 casein; SEQ ID NO: 202-SEQ ID NO: 400 and SEQ ID NO: 810 are each a nucleotide sequence encoding for alpha S2 casein; SEQ ID NO: 401 is a nucleotide sequence encoding for wild type alpha S2 casein; SEQ ID NO: 402-SEQ ID NO: 603 and SEQ ID NO: 811 are each a nucleotide sequence encoding for beta casein; SEQ ID NO: 604 is nucleotide sequence encoding for wild type beta casein; SEQ ID NO: 605-SEQ ID NO: 805 and SEQ ID NO: 812 are each a nucleotide sequence encoding for kappa casein; SEQ ID NO: 806 is nucleotide sequence encoding for wild type kapa casein; SEQ ID NO: 807 is a nucleotide sequence encoding for GY1 10AA VSD; SEQ ID NO: 808 is a peptide sequence, GY1 10AA VSD, combined with said casein protein or said casein proteins to yield a fusion protein; SEQ ID NO: 813 is a nucleotide sequence encoding for FIMXQ3; and SEQ ID NO: 814-SEQ ID NO: 920 are each a nucleotide sequence encoding for FAM20C; SEQ ID NO: 921 is nucleotide sequence encoding for wild type FAM20C; and SEQ ID NO: 922-Seq ID NO: 926 are each a nucleotide sequence encoding for FAM20A.

[0038] In the compositions herein, an isolated nucleotide sequence can be: (i) 72-80% identical to a wild type variant, such as SEQ ID NO: 201, SEQ ID NO:401, SEQ ID NO: 604, and SEQ ID NO: 806; (ii) between 74% and 78%, 74% and 77%, 74%-76%, 74%-75%, 75%-78%, 75%-77%, 75%-76%, 76%-78%, 76%-77%, or 77%-78% identical to SEQ ID NO: 921.

[0039] In the compositions herein, an isolated nucleotide sequence can be at least 85%, at least 90%, at least 95%, at least 96%, at least 97%, at least 98%, at least 99%, or 100% identical to SEQ ID NO: 1-SEQ ID NO: 200 and SEQ ID NO: 809; SEQ ID NO: 202-SEQ ID NO: 400 and SEQ ID NO: 810; SEQ ID NO: 402-SEQ ID NO: 603 and SEQ ID NO: 811; SEQ ID NO: 605-SEQ ID NO: 805 and SEQ ID NO: 812; SEQ ID NO: 813; SEQ ID NO: 814-SEQ ID NO: 920; and SEQ ID NO: 922-926.

[0040] In the compositions herein, SEQ ID NO: 1-SEQ ID NO: 807 and SEQ ID NO: 809-SEQ ID NO: 926 can be nucleic acids that do not comprise at least two, at least three, at least four, at least five, at least six, at least seven, at least eight, at least nine, at least 10, at least 11, at least 12, at least 13, at least 14, at least 15, at least 16, at least 17, at least 18, at least 19, at least 20, at least 21, at least 22, at least 23, at least 24, at least 25, at least 26, at least 27, at least 28, at least 29, at least 30, at least 31, at least 32, at least 33, at least 34, at least 35, at least 36, at least 37, at least 38, at least 39, at least 40, at least 41, at least 42, at least 43, at least 44, at least 45, or at least 46 of the sequences selected from the group consisting of GGTACC, ACCGGT, GGGCCC, GTGCAC, GGCGCGCC, GGTACC, CCTAGG, GGATCC, AGATCT, CACGTC, ATCGAT, TTCGAA, ATCGAT, CGGCCG, GAGCTC, GAATTC, GATATC, AAGCTT, GTTAAC, GGTACC, ACGCGT, CCATGG, CATATG, GCTAGC, GCGGCCGC, ATGCAT, TTAATTAA, CTCGAG, GGGCCC, CTGCAG, CGATCG, CAGCTG, GAGCTC, CCGCGG, GTCGAC, CCCGGG, TACGTA, ACTAGT, GCATGC, CTCGAG, CCCGGG, TCTAGA, CTCGAG, CCCGGG, GGTCTC and GAAGAC.

[0041] In the compositions herein, SEQ ID NO: 1-807 and SEQ ID NO: 809-926 can be nucleic acids that do not comprise GGTCTC or GAAGAC.

[0042] In the compositions herein, a fusion protein can comprise a casein protein and a peptide sequence, wherein the peptide sequence comprises an amino acid sequence that is at least 85%, at least 90%, at least 95%, at least 96%, at least 97%, at least 98%, at least 99%, or 100% identical to SEQ ID NO: 808, wherein the casein protein is alpha-S1 casein, alpha-S2 casein, beta casein, or kappa casein.

[0043] In the compositions herein, a nucleic acid molecule can comprise: a first nucleotide sequence that is at least 85%, at least 90%, at least 95%, at least 96%, at least 97%, at least 98%, at least 99%, or 100% identical to any one of SEQ ID NO:1-SEQ ID NO: 806, and a second nucleotide sequence that is at least 85%, at least 90%, at least 95%, at least 96%, at least 97%, at least 98%, at least 99%, or 100% identical SEQ ID NO: 807.

[0044] In the compositions herein, SEQ ID NO: 1-SEQ ID NO: 926 can be used, and therefore comprised within a food composition, such as a dairy product, which contain one or more plant molecules selected from a plant protein, sugar, or deoxyribonucleic acid.

[0045] In the compositions herein, SEQ ID NO: 1-SEQ ID NO: 926 can be used for the expression of caseins (alpha-S1 casein, alpha-S2 casein, beta casein, and kappa casein) and kinases (FAM20C and FAM20A) in plants, wherein said caseins and kinases can be bovine, buffalo, goat, sheep and camels, yaks, horses, reindeers and donkey proteins.

[0046] With respect to co-expressing milk proteins with kinases, the compositions herein can be free of α-lactalbumin or β-lactoglobulin; free of α-S2-casein, free of α-S1-casein, β-casein; free of lactoferrin; free of transferrin; free of serum album; free of lysozyme; free of lactoperoxidase; free of immunoglobulin-A; and/or free of lipase.

[0047] With respect to co-expressing milk proteins with kinases, the compositions herein can be essentially free of or not comprise a detectable amount of α-lanctalbumin or β-lactoglobulin; essentially free of or not comprise a detectable amount of α-S2-casein, essentially free of or not comprise a detectable amount of α-S1-casein, essentially free of or not comprise a detectable amount of β-casein; essentially free of or not comprise a detectable amount of lactoferrin; essentially free of or not comprise a detectable amount of transferrin; essentially free of or not comprise a detectable amount of serum album; essentially free of or not comprise a detectable amount of lysozyme; essentially free of or not comprise a detectable amount of lactoperoxidase; essentially free of or not comprise a detectable amount of immunoglobulin-A; and/or essentially free of or not comprise a detectable amount of lipase. Compositions essentially free of these said proteins have trace amounts that are higher than the amounts of these proteins when the composition is free of these said proteins.

[0048] With respect to co-expressing milk proteins with kinases, the nucleotide sequences, such as SEQ ID NO: 814-SEQ ID NO: 926, as provided herein, do not comprise a nucleotide sequence that is susceptible to enzymatic digestion by one or more restriction enzymes. For example, the nucleotide sequences provided herein do not comprise a nucleotide sequence that is susceptible to enzymatic digestion by one or more the following restriction digestion enzymes: Acc65I (GGTACC), AgeI (ACCGGT), ApaI (GGGCCC), ApaLI (GTGCAC), AscI (GGCGCGCC), Asp718I (GGTACC), AvrII (CCTAGG), BamHI (GGATCC), BglII (AGATCT), BmgBI (CACGTC), BspDI (ATCGAT), BstBI (TTCGAA), ClaI (ATCGAT), EagI (CGGCCG), Ecl136II (GAGCTC), EcoRI (GAATTC), EcoRV (GATATC), HindIII (AAGCTT), HpaI (GTTAAC), KpnI (GGTACC), MluI (ACGCGT), NcoI (CCATGG), NdeI (CATATG), NheI (GCTAGC), NotI (GCGGCCGC), NsiI (ATGCAT), PacI (TTAATTAA), PacR7I (CTCGAG), PspOMI (GGGCCC), PstI (CTGCAG), PvuI (CGATCG), PvuII (CAGCTG), SacI (GAGCTC), SacII (CCGCGG), SalI (GTCGAC), SmaI (CCCGGG), SnaBI (TACGTA), SpeI (ACTAGT), SphI (GCATGC), TliI (CTCGAG), TspMI (CCCGGG), XbaI (TCTAGA), XhoI (CTCGAG), XmaI (CCCGGG). In some cases, the nucleotide sequences provided herein do not comprise one or more of the nucleotide sequences in the list above. In some cases, the nucleotide sequences provided herein do not comprise any of the nucleotide sequences in the list above. In some cases, the nucleotide sequences provided herein do not comprise a nucleotide sequence that is susceptible to enzymatic digestion by Eco31I (i.e., BsaI, Bso31I, BspTNI) or BpiI (i.e., BbsI, BpuAI, BstV2I). In some cases, the nucleotide sequences provided herein do not comprise nucleotide sequences GGTCTC or GAAGAC.

[0049] The compositions herein, which include the nucleotide sequences SEQ ID NO: 1-SEQ ID NO: 807, and SEQ ID NO: 809-SEQ ID NO: 926, can be codon-optimized for a plant, wherein the plant can be any one of the following, for example, angiosperms and gymnosperms such as Arabidopsis, potato, tomato, tobacco, alfalfa, lemice, carrot, strawberry, sugar beet, cassava, sweet potato, soybean, lima bean, pea, chick pea, maize (com), turf grass, wheat, rice, barley, sorghum, oat, oak, eucalyptus, walnut, palm and duckweed a well as fern and moss. In some aspects, the nucleotide sequences provided herein are codon-optimized for a plant, wherein the plant is a monocot, a dicot, or a vascular plant reproduced from spores such as fern or a nonvascular plant such as moss, liverwort, hornwort and algae. In some aspects, the nucleotide sequences provided herein are codon-optimized for a dicot plant, include for example Arabidopsis, tobacco, tomato, potato, sweet potato, cassava, alfalfa, lima bean, pea, chick pea, soybean, carrot, strawberry, lettuce, oak, maple, walnut, rose, mint, squash, daisy, quinoa, buckwheat, mung bean, cow pea, lentil, lupin, peanut, fava bean, French beans, mustard, or cactus. In some aspects, the nucleotide sequences provided herein are codon-optimized for a monocot plant, including for example, turf grass, maize (corn), rice, oat, wheat, barley, sorghum, orchid, iris, lily, onion, palm, and duckweed. In some cases, the nucleotide sequences provided herein are codon-optimized for a soybean (i.e., glycine max).

[0050] In the compositions herein, SEQ ID NO: 1-SEQ ID NO: 807 and SEQ ID NO: 809-SEQ ID NO: 926 can contribute to new protein folding patterns compared to wild type, due to the impact of codon changes on the rate of protein synthesis. In some embodiments, changes in codon usage enhance the stability and localization of mRNA, optimizing the quantity and positioning of protein synthesis. In some embodiments, the variability of tRNA availability across organisms aligns with the introduced codons, prompting unique translation dynamics. In some embodiments, the modified codon usage enriches traditional patterns of gene expression by affecting the regulatory sequences of DNA and RNA. In some embodiments, changes in codon usage provide an additional dimension to post-translational modifications vital to protein function by introducing alterations in translation speed and timing.

[0051] In the compositions herein, a food composition (such as a dairy product) can comprise: a casein protein or a DNA coding for a casein protein comprising SEQ ID NO: 1-SEQ ID NO: 807 or SEQ ID NO: 809-SEQ ID NO: 813; and a nucleic acid molecule comprising SEQ ID NO: 814-SEQ ID NO: 926.

[0052] In the compositions herein, a food composition (such as a dairy product) can comprise: a first nucleic acid molecule comprising SEQ ID NO: 814-SEQ ID NO: 926; and a second nucleic acid molecule comprising SEQ ID NO: 814-SEQ ID NO: 926.

### Definitions

[0053] These and other valuable aspects of the embodiments of the present disclosure consequently further the state of the technology to at least the next level. While the disclosure has been described in conjunction with a specific best mode, it is to be understood that many alternatives, modifications, and variations will be apparent to those skilled in the art in light of the descriptions herein. Accordingly, it is intended to embrace all such alternatives, modifications, and variations that fall within the scope of the included claims. All matters set forth herein or shown in the accompanying drawings are to be interpreted in an illustrative and non-limiting sense.

[0054] As used herein, the phrases “at least one”, “one or more”, and “and/or” are open-ended expressions that are both conjunctive and disjunctive in operation. For example, each of the expressions “at least one of A, B and C”, “at least one of A, B, or C”, “one or more of A, B, and C”, “one or more of A, B, or C” and “A, B, and/or C” means A alone, B alone, C alone, A and B together, A and C together, B and C together, or A, B and C together.

[0055] As used herein, the singular forms “a”, “an” and “the” are intended to include the plural forms as well, unless the context clearly indicates otherwise. Furthermore, to the extent that the terms “including”, “includes”, “having”, “has”, “with”, or variants thereof are used in either the detailed description and/or the claims, such terms are intended to be inclusive in a manner similar to the term “comprising.”

[0056] Use of absolute or sequential terms, for example, “will,” “will not,” “shall,” “shall not,” “must,” “must not,” “first,” “initially,” “next,” “subsequently,” “before,” “after,” “lastly,” and “finally,” are not meant to limit scope of the present embodiments disclosed herein but as exemplary.

[0057] As used herein, “or” may refer to “and”, “or,” or “and/or” and may be used both exclusively and inclusively. For example, the term “A or B” may refer to “A or B”, “A but not B”, “B but not A”, and “A and B”. In some cases, context may dictate a particular meaning.

[0058] Any systems, methods, software, and platforms described herein are modular and not limited to sequential steps. Accordingly, terms such as “first” and “second” do not necessarily imply priority, order of importance, or order of acts.

[0059] As used herein, the term “about” or the symbol “˜” when referring to a number or a numerical range means that the number or numerical range referred to is an approximation within experimental variability (or within statistical experimental error), and the number or numerical range may vary from, for example, from 1% to 10% of the stated number or numerical range. Unless otherwise indicated by context, the term “about” refers to +10% of a stated number or value.

[0060] As used herein, the term “approximately” means within an acceptable error range for the particular value as determined by one of ordinary skill in the art, which will depend in part on how the value is measured or determined, e.g., the limitations of the measurement system. For example, “approximately” can mean within 1 or more than 1 standard deviation, per the practice in the given value. Where particular values are described in the application and claims, unless otherwise stated the term “approximately” should be assumed to mean an acceptable error range for the particular value.

[0061] Where a range of values is provided, it is understood that each intervening value, to the tenth of the unit of the lower limit unless the context clearly dictates otherwise, between the upper and lower limit of that range and any other stated or intervening value in that stated range, is encompassed within the disclosure. The upper and lower limits of these smaller ranges may independently be included in the smaller ranges, and are also encompassed within the disclosure, subject to any specifically excluded limit in the stated range. Where the stated range includes one or both of the limits, ranges excluding either or both of those included limits are also included in the disclosure.

[0062] All ranges disclosed herein also encompass any and all possible sub-ranges and combinations of sub-ranges thereof. Any listed range can be recognized as sufficiently describing and enabling the same range being broken down into at least equal halves, thirds, quarters, fifths, tenths, and so forth. As a non-limiting example, each range discussed herein can be readily broken down into a lower third, middle third and upper third, and the like. All language such as “up to,” “at least,” “greater than,” “less than,” and the like include the number recited and refer to ranges which can be subsequently broken down into sub-ranges as discussed above. Finally, a range includes each individual member. Thus, for example, a group having 1-3 articles refers to groups having 1, 2, or 3 articles. Similarly, a group having 1-5 articles refers to groups having 1, 2, 3, 4, or 5 articles, and so forth.

[0063] Whenever the term “at least,” “greater than,” “greater than or equal to”, or a similar phrase precedes the first numerical value in a series of two or more numerical values, the term “at least,” “greater than,” “greater than or equal to” or similar phrase applies to each of the numerical values in that series of numerical values. For example, “at least 1, 2, or 3” is equivalent to “at least 1, at least 2, and/or at least 3.”

[0064] Whenever the term “no more than,” “less than,” “less than or equal to,” “no greater than,” “at most” or a similar phrase, precedes the first numerical value in a series of two or more numerical values, the term “no more than,” “less than,” “less than or equal to,” “no greater than,” “at most,” or similar phrase applies to each of the numerical values in that series of numerical values. For example, “less than 3, 2, or 1” is equivalent to “less than 3, less than 2, and/or less than 1.”

[0065] As used herein, the following meanings apply unless otherwise specified. The word “may” is used in a permissive sense (i.e., meaning having the potential to), rather than the mandatory sense (i.e., meaning must). The words “include”, “including”, and “includes” and the like mean including, but not limited to. The singular forms “a,” “an,” and “the” include plural referents. Thus, for example, reference to “an element” includes a combination of two or more elements, notwithstanding use of other terms and phrases for one or more elements, such as “one or more.” The phrase “at least one” includes “one”, “one or more”, “one or a plurality” and “a plurality”. The term “or” is, unless indicated otherwise, non-exclusive, i.e., encompassing both “and” and “or.” The term “any of” between a modifier and a sequence means that the modifier modifies each member of the sequence. So, for example, the phrase “at least any of 1, 2 or 3” means “at least 1, at least 2 or at least 3”. The term “consisting essentially of” refers to the inclusion of recited elements and other elements that do not materially affect the basic and novel characteristics of a claimed combination.

[0066] As used herein, a “vector” is a plasmid comprising operably linked polynucleotide sequences that facilitate expression of a coding sequence in a particular host organism (e.g., a bacterial expression vector or a plant expression vector). Polynucleotide sequences that facilitate expression in prokaryotes can include, e.g., a promoter, an enhancer, an operator, and a ribosome binding site, often along with other sequences. Eukaryotic cells can use promoters, enhancers, termination and polyadenylation signals and other sequences that are generally different from those used by prokaryotes.

[0067] As used herein, the term “casein micelles” are micelles comprising casein proteins. Examples of casein micelles are described in U.S. patent application Ser. No. 16/741,680 (U.S. Pat. No. 11,326,176), filed on Jan. 13, 2020, titled “Recombinant micelle and method of in vivo assembly,” and in U.S. patent application Ser. No. 17/826,021 filed on May 26, 2022, both incorporated herein by reference in its entirety. Recombinant casein micelles can be made in vivo or in vitro using the methods described therein. U.S. patent application Ser. No. 17/826,021 (United States Patent Application US20220290167A1), titled “Recombinant micelle and method of in vivo assembly” teaches vectors and sequences for making recombinant casein proteins and micelles, which is incorporated herein by reference in its entirety.

[0068] As used herein, the term “milk” means a liquid composition that contains soluble casein micelles and where the weight of soluble casein micelles is equal to or greater than 1% of the total protein weight in the composition.

[0069] U.S. Pat. No. 11,457,649 describes a substitute dairy food, and U.S. patent application Ser. No. 16/862,011 (Publication No. US20210010017A1) describes food compositions comprising a milk protein, both of which are incorporated herein by reference in their entirety.

[0070] As used herein, the term “dairy characteristic” means a characteristic selected from one of the following characteristics of a dairy food: adhesiveness, airiness, appearance, aroma, binding, chewdown, chewiness, coagulation, cohesiveness, compactness, creaminess, crispiness, crumbliness, density, elasticity, emulsification, fattiness, firmness, flavor, foaminess, graininess, greasiness, hardness, handling, juiciness, leavening, mouthcoating, mouthfeel, richness, roughness, slipperiness on tongue, smoothness, springiness, structure, taste, tenderness, texture, thickness, uniformity, and wetness.

[0071] In some aspects, the current disclosure provides food products and food product substitutes comprising the nucleic acids disclosed herein. Contemplated food products include dairy products or products that resembles a dairy product (i.e., dairy product substitutes). The term “dairy product” as used herein refers to milk (e.g., whole milk (at least 3.25% milk fat), partly skimmed milk (from 1% to 2% milk fat), skim milk (less than 0.2% milk fat), cooking milk, condensed milk, flavored milk, goat milk, sheep milk, dried milk, evaporated milk, milk foam), and products derived from milk, including but not limited to yogurt (e.g., whole milk yogurt (at least 6 grams of fat per 170 g), low-fat yogurt (between 2 and 5 grams of fat per 170 g), nonfat yogurt (0.5 grams or less of fat per 170 g), greek yogurt (strained yogurt with whey removed), whipped yogurt, goat milk yogurt, Labneh (labne), sheep milk yogurt, yogurt drinks (e.g., whole milk Kefir, low-fat milk Kefir), Lassi), cheese (e.g., whey cheese such as ricotta; pasta filata cheese such as mozzarella; semi-soft cheese such as Havarti and Muenster; medium-hard cheese such as Swiss and Jarlsberg; hard cheese such as Cheddar and Parmesan; washed curd cheese such as Colby and Monterey Jack; soft ripened cheese such as Brie and Camembert; fresh cheese such as cottage cheese, feta cheese, cream cheese, and curd; processed cheese; processed cheese food; processed cheese product; processed cheese spread; enzyme-modulated cheese; cold-pack cheese), dairy-based sauces (e.g., fresh, frozen, refrigerated, or shelf stable), dairy spreads (e.g., low-fat spread, low-fat butter), cream (e.g., dry cream, heavy cream, light cream, whipping cream, half-and-half, coffee whitener, coffee creamer, sour cream, creme fraiche), frozen confections (e.g., ice cream, smoothie, milk shake, frozen yogurt, sundac, gelato, custard), dairy desserts (e.g., fresh, refrigerated, or frozen), butter (e.g., whipped butter, cultured butter), dairy powders (e.g., whole milk powder, skim milk powder, fat-filled milk powder (i.e., milk powder comprising plant fat in place of all or some animal fat), infant formula, milk protein concentrate (i.e., protein content of at least 80% by weight), milk protein isolate (i.e., protein content of at least 90% by weight), whey protein concentrate, whey protein isolate, demineralized whey protein concentrate, demineralized whey protein concentrate, .beta.-lactoglobulin concentrate, .beta.-lactoglobulin isolate, alpha-lactalbumin concentrate, alpha-lactalbumin isolate, glycomacropeptide concentrate, glycomacropeptide isolate, casein concentrate, casein isolate, nutritional supplements, texturizing blends, flavoring blends, coloring blends), ready-to-drink or ready-to-mix products (e.g., fresh, refrigerated, or shelf stable dairy protein beverages, weight loss beverages, nutritional beverages, sports recovery beverages, and energy drinks), puddings, gels, chewables, crisps, and bars. As used herein, the term “food product substitute” (e.g., “dairy product substitute”) refers to a food product that resembles a conventional food product (e.g., can be used in place of the conventional food product). Such resemblance can be due to any physical, chemical, or functional attribute. In some embodiments, the resemblance of the food product provided herein to a conventional food product is due to a physical attribute. Non-limiting examples of physical attributes include color, shape, mechanical characteristics (e.g., hardness, G′ storage modulus value, shape retention, cohesion, texture (i.e., mechanical characteristics that are correlated with sensory perceptions (e.g., mouthfeel, fattiness, creaminess, homogenization, richness, smoothness, thickness), viscosity, and crystallinity. In some embodiments, the resemblance of the food product provided herein and a conventional food product is due to a chemical/biological attribute. Non-limiting examples of chemical attributes include nutrient content (e.g., type and/or amount of amino acids (e.g., PDCAAS score), type and/or amount of lipids, type and/or amount of carbohydrates, type and/or amount of minerals, type and/or amount of vitamins), pH, digestibility, shelf-life, hunger and/or satiety regulation, taste, and aroma. In some embodiments, the resemblance of the food product provided herein to a conventional food product is due to a functional attribute. Non-limiting examples of functional attributes include gelling/agglutination behavior (e.g., gelling capacity (i.e., time required to form a gel (i.e., a protein network with spaces filled with solvent linked by hydrogen bonds to the protein molecules) of maximal strength in response to a physical and/or chemical condition (e.g., agitation, temperature, pH, ionic strength, protein concentration, sugar concentration, ionic strength)), agglutination capacity (i.e., capacity to form a precipitate (i.e., a tight protein network based on strong interactions between protein molecules and exclusion of solvent) in response to a physical and/or chemical condition), gel strength (i.e., strength of gel formed, measured in force/unit area (e.g., pascal (Pa))), water holding capacity upon gelling, syneresis upon gelling (i.e., water weeping over time)), foaming behavior (e.g., foaming capacity (i.e., amount of air held in response to a physical and/or chemical condition), foam stability (i.e., half-life of foam formed in response to a physical and/or chemical condition), foam seep), thickening capacity, use versatility (i.e., ability to use the food product in a variety of manners and/or to derive a diversity of other compositions from the food product; e.g., ability to produce food products that resemble milk derivative products such as yoghurt, cheese, cream, and butter), and ability to form protein dimers.

[0072] Where a definition or use of a term in an incorporated reference is inconsistent or contrary to the definition of that term provided herein, the definition of that term provided herein applies and the definition of that term in the reference does not apply.

[0073] As used herein, the term “recombinant” refers to nucleic acids or proteins formed by laboratory methods of genetic recombination (e.g., molecular cloning) to bring together genetic material from multiple sources, creating sequences that would otherwise not be found in the genome. Recombinant proteins may be expressed in vivo in various types of host cells, including plant cells, bacterial cells, fungal cells, avian cells, and mammalian cells. Recombinant proteins may also be generated in vitro. As used herein, the term “tagged protein” refers to a recombinant protein that includes additional peptides that are not part of the native protein and that remain after post-translational processing.

[0074] As used herein, the term “milk solids” refers to the powder that would be left after milk is dried out and the water is removed.

[0075] As used herein, the phrase “essentially free of” is used to indicate the indicated component, if present, is present in an amount that does not contribute, or contributes only in a de minimus fashion, to the properties of the composition. In various embodiments, where a composition is essentially free of a particular component, the component is present in less than a functional amount. In various embodiments, the component may be present in trace amounts. Particular limits will vary depending on the nature of the component, but may be, for example, selected from less than 10% by weight, less than 9% by weight, less than 8% by weight, less than 7% by weight, less than 6% by weight, less than 5% by weight, less than 4% by weight, less than 3% by weight, less than 2% by weight, less than 1% by weight, less than 0.5% by weight, less than 0.1% by weight, or less than 0.05% by weight, or less than 0.01% by weight.

[0076] As used herein, the term “stably expressed” refers to expression and accumulation of a protein in a plant cell over time. As an example, a recombinant protein may accumulate because it is not degraded by endogenous plant proteases. As a further example, a recombinant protein is considered to be stably expressed in a plant if it is present in the plant in an amount of 1% or higher per total protein weight of soluble protein extractable from the plant.

[0077] As used herein, the term “a detectable amount” refers to an amount of a composition (e.g., a molecule) that can be detected using the most sensitive analytical techniques up to date, including for example, liquid chromatography methods (e.g., reverse phase HPLC, size exclusion, normal phase chromatography), mass spectrometry (e.g., electrospray tandem mass spectrometry, and electrospray FT-ICR mass spectrometry), or a combination of analytical techniques (e.g., liquid chromatography-tandem mass spectrometry (LC-MS/MS)). In some cases, a detectable amount is at a concentration above 10-2 mol/L, 10-3 mol/L, 10-4 mol/L, 10-5 mol/L, 10-6 mol/L, 10-7 mol/L, 10-8 mol/L, 10-9 mol/L, or 10-10 mol/L.

[0078] As used herein, the term “naturally occurring” means without genetic modification. For example, a naturally occurring ratio of two plant proteins means a ratio of the two plant proteins found in plant (e.g., plant seed), where the plant is not genetically modified to manipulate the expression levels of the two proteins.

[0079] As used herein, the term “recombinant” refers to nucleic acids or proteins formed by laboratory methods of genetic recombination (e.g., molecular cloning) to bring together genetic material from multiple sources, creating sequences that would otherwise not be found in the genome. Recombinant proteins may be expressed in vivo in various types of host cells, including plant cells, bacterial cells, fungal cells, avian cells, and mammalian cells. Recombinant proteins may also be generated in vitro. As used herein, the term “tagged protein” refers to a recombinant protein that includes additional peptides that are not part of the native protein and that remain after post-translational processing.

[0080] Definition of standard chemistry terms may be found in reference works, including but not limited to, Carey and Sundberg “Advanced Organic Chemistry 4th Ed.” Vols. A (2000) and B (2001), Plenum Press, New York.

[0081] As used herein, the term “homogenous” means of uniform structure or composition throughout, such that individual components (e.g., probiotics, particles) cannot be separately observed with naked eye.

[0082] As used herein, the term “plant” includes whole plant, plant organ, plant tissues, and plant cell and progeny of same, but is not limited to angiosperms and gymnosperms such as Arabidopsis, potato, tomato, tobacco, alfalfa, lemice, carrot, strawberry, sugarbeet, cassava, sweet potato, soybean, lima bean, pea, chick pea, maize (com), turf grass, wheat, rice, barley, sorghum, oat, oak, eucalyptus, walnut, palm and duckweed a well as fern and moss. Thus, a plant may be a monocot, a dicot, a vascular plant reproduced from spores such as fern or a nonvascular plant such as moss, liverwort, hornwort and algae. The term “plant,” as used herein, also encompasses plant cells, seeds, plant progeny, propagule whether generated sexually or asexually, and descendants of any of these, such as cuttings or seed. Plant cells include suspension cultures, callus, embryos, meristematic regions, callus tissue, leaves, roots, shoots, gametophytes, sporophytes, pollen, seeds and microspores. Plants may be at various stages of maturity and may be grown in liquid or solid culture, or in soil or suitable media in pots, greenhouses or fields. As used herein, the term “plant protein” refers to a protein that is at least 70% homologous to a protein that naturally occurs in a plant.

[0083] As used herein, the term “dicot” refers to a flowering plant whose embryos have two seed leaves or cotyledons. Examples of dicots include Arabidopsis, tobacco, tomato, potato, sweet potato, cassava, alfalfa, lima bean, pea, chick pea, soybean, carrot, strawberry, lettuce, oak, maple, walnut, rose, mint, squash, daisy, quinoa, buckwheat, mung bean, cow pea, lentil, lupin, peanut, fava bean, French beans, mustard, or cactus.

[0084] As used herein, the term “monocot” refers to a flowering plant whose embryos have one cotyledon or seed leaf. Examples of monocots include turf grass, maize (corn), rice, oat, wheat, barley, sorghum, orchid, iris, lily, onion, palm, and duckweed.

[0085] As used herein, the term “transgenic plant” means a plant that has been transformed with one or more exogenous nucleic acids. “Transformation” refers to a process by which a nucleic acid is stably integrated into the genome of a plant cell. “Stably transformed” refers to the permanent, or non-transient, retention, expression, or a combination thereof of a polynucleotide in and by a cell genome. A stably integrated polynucleotide is one that is a fixture within a transformed cell genome and can be replicated and propagated through successive progeny of the cell or resultant transformed plant. Transformation can occur under natural or artificial conditions using various methods. Transformation can rely on any method for the insertion of nucleic acid sequences into a prokaryotic or eukaryotic host cell, including Agrobacterium-mediated transformation as illustrated in U.S. Pat. Nos. 5,159,135; 5,824,877; 5,591,616 and 6,384,301, all of which are incorporated herein by reference in its entirety. Methods for plant transformation also include microprojectile bombardment as illustrated in U.S. Pat. Nos. 5,015,580; 5,550,318; 5,538,880; 6,153,812; 6,160,208; 6,288,312 and 6,399,861, all of which are incorporated herein by reference in its entirety. Recipient cells for the plant transformation include meristem cells, callus, immature embryos, hypocotyls explants, cotyledon explants, leaf explants, and gametic cells such as microspores, pollen, sperm and egg cells, and any cell from which a fertile plant can be regenerated, as described in U.S. Pat. Nos. 6,194,636; 6,232,526; 6,541,682 and 6,603,061 and U.S. Patent Application publication US 2004/0216189 A1, all of which are incorporated herein by reference in its entirety.

[0086] Additional methods and concepts related to codon optimization are described in U.S. Patent Application publication US20200024327A1 (Optimized factor viii gene) to Tan et al and in U.S. Pat. No. 9,427,003 (Synthetic genes) to Larrinua et al, both of which are incorporated herein by reference in its entirety.

[0087] As used herein, the term “in-vitro” means outside a living organism.

[0088] As used herein, the term “fusion protein” refers to a protein comprising at least two constituent proteins that are encoded by separate genes, and that have been joined so that they are transcribed and translated as a single polypeptide.

[0089] Certain aspects of the disclosure have other steps or elements in addition to or in place of those mentioned above. The steps or elements will become apparent to those skilled in the art from a reading of the following detailed description when taken with reference to the accompanying drawings.

[0090] While some embodiments of the present invention have been shown and described herein, it will be obvious to those skilled in the art that such embodiments are provided by way of example only. Numerous variations, changes, and substitutions will now occur to those skilled in the art without departing from the invention. Various alternatives to the embodiments of the invention described herein may be employed in practicing the invention. It is intended that the following claims define the scope of the invention and that methods and structures within the scope of these claims and their equivalents be covered thereby.

1-57. (canceled)

58. A nucleic acid molecule comprising a nucleotide sequence selected from SEQ ID NO: 605-SEQ ID NO: 806.

59. The nucleic acid molecule of claim 58, wherein the nucleotide sequence is at least 85%, at least 90%, at least 95%, at least 96%, at least 97%, at least 98%, at least 99%, or 100% identical to any one of SEQ ID NO: 605-SEQ ID NO: 805.

60. The nucleic acid molecule in claim 58, wherein the nucleotide sequence is between 72% and 80% identical to SEQ ID NO: 806.

61. The nucleic acid molecule in claim 58, wherein the nucleotide sequence codes for kappa casein.

62. The nucleic acid molecule of claim 58, wherein the nucleotide sequence is at least 70% but no more than 80% identical to any one of SEQ ID NO: 605-SEQ ID NO: 806.

63. The nucleic acid molecule of claim 58, wherein the nucleotide sequence is at least 72% but no more than 78% identical to any one of SEQ ID NO: 605-SEQ ID NO: 806.

64. The nucleic acid molecule of claim 58, wherein the nucleotide sequence is at least 74% but no more than 76% identical to any one of SEQ ID NO: 605-SEQ ID NO: 806.

65. The nucleic acid molecule in claim 58, wherein the nucleic acid molecule does not comprise at least two, at least three, at least four, at least five, at least six, at least seven, at least eight, at least nine, at least 10, at least 11, at least 12, at least 13, at least 14, at least 15, at least 16, at least 17, at least 18, at least 19, at least 20, at least 21, at least 22, at least 23, at least 24, at least 25, at least 26, at least 27, at least 28, at least 29, at least 30, at least 31, at least 32, at least 33, at least 34, at least 35, at least 36, at least 37, at least 38, at least 39, at least 40, at least 41, at least 42, at least 43, at least 44, at least 45, or at least 46 of the sequences selected from the group consisting of GGTACC, ACCGGT, GGGCCC, GTGCAC, GGCGCGCC, GGTACC, CCTAGG, GGATCC, AGATCT, CACGTC, ATCGAT, TTCGAA, ATCGAT, CGGCCG, GAGCTC, GAATTC, GATATC, AAGCTT, GTTAAC, GGTACC, ACGCGT, CCATGG, CATATG, GCTAGC, GCGGCCGC, ATGCAT, TTAATTAA, CTCGAG, GGGCCC, CTGCAG, CGATCG, CAGCTG, GAGCTC, CCGCGG, GTCGAC, CCCGGG, TACGTA, ACTAGT, GCATGC, CTCGAG, CCCGGG, TCTAGA, CTCGAG, CCCGGG, GGTCTC and GAAGAC.

66. The nucleic acid molecule in claim 65, wherein the nucleic acid molecule does not comprise GGTCTC.

67. The nucleic acid molecule in claim 66, wherein the nucleic acid molecule does not comprise GAAGAC.

68. A food composition comprising any one of SEQ ID NO: 605-SEQ ID NO: 806.

69. The food composition of claim 68, wherein any one of SEQ ID NO: 605-SEQ ID NO: 806 codes for kappa casein.

70. A fusion protein, comprising a casein protein and a peptide sequence, wherein the peptide sequence comprises an amino acid sequence that is at least 85%, at least 90%, at least 95%, at least 96%, at least 97%, at least 98%, at least 99%, or 100% identical to SEQ ID NO: 808.

71. The fusion protein in claim 70, wherein the casein protein is alpha S1 casein, alpha S2 casein, beta casein, or kappa casein.

72. The fusion protein of claim 71, wherein kappa casein is encoded by a nucleotide sequence selected from SEQ ID NO: 605-SEQ ID NO: 806.

73. The fusion protein of claim 72, wherein the nucleotide sequence is at least 85%, at least 90%, at least 95%, at least 96%, at least 97%, at least 98%, at least 99%, or 100% identical to any one of SEQ ID NO: 605-SEQ ID NO: 805.

74. The fusion protein of claim 72, wherein the nucleotide sequence is between 72% and 80% identical to SEQ ID NO: 806.

75. The fusion protein of claim 72, the nucleotide sequence is at least 70% but no more than 80% identical to any one of SEQ ID NO: 605-SEQ ID NO: 806.

76. The fusion protein of claim 72, wherein the nucleotide sequence is at least 72% but no more than 78% identical to any one of SEQ ID NO: 605-SEQ ID NO: 806.

77. The fusion protein of claim 72, wherein the nucleotide sequence is at least 74% but no more than 76% identical to any one of SEQ ID NO: 605-SEQ ID NO: 806.

The application's sequence listing, which the Patent Office published only in electronic form, follows.

SEQUENCE LISTING (926 sequences)

SEQ ID NO: 1 - DNA, 642 bp, synthetic construct
  source 1..642: mol_type = other DNA
atgaagttgcttatcttgacatgtttggttgctgtagccctcgctcgtcctaagcacccaatcaagcatcaaggcctccctcaggaggtgcttaatgagaacctgttgcgcttcttcgtggccccctttcctgaggtattcggaaaggaaaaagtcaacgagctttccaaagatatcggctcagagtctaccgaagaccaggccatggaggacattaaacaaatggaggctgaatcaatcagttcttctgaggagatcgtgccaaactcagtcgagcaaaaacatatacagaaggaagacgttccctctgagaggtatcttggttacctcgaacaactgctgcgccttaaaaagtataaagtgccacaactcgaaattgtgcccaatagtgccgaggagcgtctccactctatgaaggaaggaatacatgcccagcaaaaagaacccatgattggtgttaatcaagagttggcatatttttatccagaattgttccgtcaattttatcaactggatgcctacccatccggggcatggtactatgttcccttgggcacacagtacactgatgcaccatctttttcagacatacctaatcctataggtagtgagaatagcgaaaagaccaccatgcctctctgg

SEQ ID NO: 2 - DNA, 642 bp, synthetic construct
  source 1..642: mol_type = other DNA
atgaaactcctgatcttgacttgccttgttgcagtagcacttgctagacccaagcatcccattaaacaccagggcctgcctcaagaagtattgaatgaaaatctccttcgcttctttgtcgcacccttcccagaggtctttggtaaagaaaaagttaatgaattgagcaaagatatcggctcagagtcaactgaggatcaagctatggaggatataaaacagatggaagctgagagtatatccagtagtgaggaaattgtccccaacagtgtggagcagaaacatatacagaaggaggatgttcctagtgagagataccttggctacttggagcaattgctcagactcaaaaaatacaaagtaccacaactggagatagtgcctaactccgcagaggagaggctccatagcatgaaagagggaatacacgcacaacagaaggaaccaatgataggagtcaatcaggagctggcctatttttatcccgaattgttccgtcagttctaccagctcgatgcctatccaagcggcgcatggtactacgttccccttggcacacaatacaccgacgcaccctcattttcagatataccaaacccaattggatctgagaacagtgaaaagaccaccatgccattgtgg

SEQ ID NO: 3 - DNA, 642 bp, synthetic construct
  source 1..642: mol_type = other DNA
atgaaattgctcatcctcacttgcctggtcgccgtagcactggctaggccaaaacaccctattaagcaccaggggctccctcaggaagttctcaacgaaaatttgctcaggttttttgtagctccttttcctgaggtcttcggtaaagaaaaggtaaatgagttgagcaaagacataggaagtgaatccaccgaagatcaagctatggaggacattaaacaaatggaagctgaatcaattagcagttctgaggagatcgtgcccaattccgtcgagcagaagcatattcagaaggaagatgtgccaagcgaaaggtaccttggataccttgagcaattgttgagactgaagaaatacaaagtaccccaactggagattgtacccaacagcgcagaggaacgccttcatagcatgaaggaaggcatccacgcccagcaaaaagaacccatgattggggtcaaccaagagttggcctatttttatcctgaactcttccgtcaattttatcagcttgatgcatacccctcaggcgcttggtactacgtccccctggggacacaatacacagacgccccctcattcagcgatatccctaatcctattggaagtgagaatagcgaaaaaacaactatgcctctgtgg

SEQ ID NO: 4 - DNA, 642 bp, synthetic construct
  source 1..642: mol_type = other DNA
atgaaactgctgatcctgacttgtttggtcgccgtcgcactggctagacccaagcatccaataaaacatcaaggactcccccaggaagtactcaatgaaaaccttctcagattcttcgtggctcctttccccgaggtctttggaaaggagaaagttaacgagctttccaaggacatagggagcgaaagcacagaagaccaagcaatggaggacattaaacagatggaggccgagtctatttcaagctccgaggaaatcgtcccaaactccgtggaacagaaacatatacaaaaggaggatgtcccctcagagcgctacttggggtacttggagcagctcctccgtcttaaaaagtataaagttccacagttggaaatcgtccctaattccgccgaagagagactgcacagtatgaaagaaggaatacatgcacagcagaaagagcctatgataggcgttaatcaggaactggcctatttttatccagaacttttcaggcagttctaccagttggacgcatacccatccggtgcttggtactacgtcccccttggcacccaatacactgacgcacccagtttttcagacatccccaaccctataggttctgaaaacagcgaaaagaccacaatgccattgtgg

SEQ ID NO: 5 - DNA, 642 bp, synthetic construct
  source 1..642: mol_type = other DNA
atgaaattgcttattttgacctgtctggtagcagtagctctggcaagacctaagcaccccatcaagcaccaaggtcttcctcaagaggtattgaacgaaaacttgctgagattttttgtggccccttttcctgaagtcttcggtaaggaaaaagttaacgagttgtctaaggatataggatctgaatcaactgaggaccaagctatggaggatatcaaacagatggaagccgagagcatatccagtagcgaggagattgtccccaactcagtggagcagaagcatatccagaaggaggatgttcctagcgagaggtatttgggttacttggaacagcttcttcgtttgaagaaatataaggttccccagcttgaaattgttccaaattcagctgaagaacgtctccatagtatgaaggaggggattcacgctcagcagaaagagccaatgattggagttaatcaagaactcgcctatttttatcccgaattgttcagacagttttatcaactcgatgcatatccaagcggggcatggtactatgtgcctcttggtactcaatacacagatgcaccctctttttcagatataccaaatcccataggatctgaaaattctgagaaaacaactatgcctctctgg

SEQ ID NO: 6 - DNA, 642 bp, synthetic construct; identical to SEQ ID NO: 5
  source 1..642: mol_type = other DNA

SEQ ID NO: 7 - DNA, 642 bp, synthetic construct
  source 1..642: mol_type = other DNA
atgaaattgcttatattgacttgcctggtggcagtggcacttgcccgccctaaacatccaatcaagcatcaggggctccctcaagaagtccttaatgaaaatcttttgaggtttttcgtagcacctttccctgaggtgtttggaaaggagaaggttaacgaactgagtaaagatattgggtcagaatccacagaagatcaagcaatggaagatataaaacaaatggaggcagaatctatctcatcttctgaagaaatagtccctaattcagtcgagcagaaacatatccagaaggaggacgtgccttctgagaggtatttgggttatttggaacagttgctccgtttgaaaaagtataaggtgccccagctcgagatcgttcctaactctgccgaagaaaggcttcatagcatgaaggagggcattcacgcccaacaaaaagaacccatgatcggcgtcaatcaagagcttgcatacttctatcctgaactttttcgtcaattctaccagttggacgcctacccctcaggggcttggtactacgtacctctgggcacacagtacactgatgctccatccttttctgacatacccaatccaatagggtccgaaaactctgagaaaaccactatgcctctgtgg

SEQ ID NO: 8 - DNA, 642 bp, synthetic construct
  source 1..642: mol_type = other DNA
atgaagctcctcattctcacctgcctcgtggccgtagccttggcacgtcccaagcatccaatcaagcatcaaggcttgccacaagaggttttgaatgagaatttgctccgttttttcgttgctccctttccagaggtatttggaaaggaaaaagtcaacgaactttcaaaggacattgggtctgagtcaacagaggatcaagcaatggaggatataaaacaaatggaggccgagtccatatcttcaagcgaagagatcgtcccaaattctgtcgaacagaaacacatccagaaagaagatgtaccatcagagaggtacctgggctacctcgagcagcttttgcgtctgaaaaaatacaaggtcccacaactggaaatagtacccaattctgccgaggaaagactgcattctatgaaggagggcattcatgcacaacaaaaagaacctatgataggcgtaaatcaggaacttgcatatttttaccctgaattgttccgccaattctaccaactcgatgcctatccctccggtgcttggtactatgtgcccttgggtactcaatatacagatgctcccagcttcagtgacattccaaacccaatagggagcgagaactcagagaaaactactatgcctctgtgg

SEQ ID NO: 9 - DNA, 642 bp, synthetic construct
  source 1..642: mol_type = other DNA
atgaagttgcttattctgacctgtctcgtggccgtagcactcgccagaccaaagcatcctataaagcaccagggcctcccacaggaagtattgaacgagaatctgctcaggttcttcgtggcccctttccccgaagtgttcggtaaagagaaggtcaacgaactctcaaaagacatcggctccgagtctacagaagatcaagctatggaagacatcaagcagatggaagctgagtcaatcagctcttctgaggagatagtacctaactccgttgagcaaaagcacattcaaaaggaggatgttccatccgagcgttaccttggctatcttgaacagttgcttcgtctcaaaaagtataaggtgccccaattggaaatcgtgccaaattctgctgaggaaaggcttcattccatgaaggagggcatccatgcccaacaaaaggaaccaatgattggggtgaatcaggagcttgcttacttttaccccgaacttttcagacagttttaccaactggacgcttatcccagcggcgcatggtactatgtacccctgggcacacagtatacagacgctccatccttctctgacatacccaatcctatagggtccgaaaatagtgagaagactaccatgccactttgg

SEQ ID NO: 10 - DNA, 642 bp, synthetic construct
  source 1..642: mol_type = other DNA
atgaaactgttgattctgacttgtctcgtggccgtggcattggcacgtcccaaacaccctataaagcatcaaggccttccacaggaagtccttaacgagaacctcctccgcttcttcgtagcccccttcccagaggtattcggaaaggaaaaggtgaatgaactgagcaaggacataggaagtgagtcaactgaagatcaagcaatggaagacattaaacagatggaagcagagtccatatcatcatccgaggaaatagtgcccaatagtgtggaacaaaaacatattcaaaaagaggacgtcccatccgagcgttatctcggctacctcgaacaacttcttcgcttgaagaagtacaaagtcccccaactggagatcgttcccaactctgccgaggaaagacttcacagcatgaaggaaggaatacacgcacaacaaaaagagcctatgattggagtaaatcaggagctggcatatttctatcccgagctcttccgtcaattttaccagctcgatgcttacccatctggcgcttggtactacgttcccctcggaacccagtacactgatgctccttcattttctgatataccaaaccccatagggtctgaaaatagtgagaagaccaccatgcccctgtgg

SEQ ID NO: 11 - DNA, 642 bp, synthetic construct
  source 1..642: mol_type = other DNA
atgaaacttttgatactcacctgtttggtagcagttgcactggccagacctaaacatcccatcaagcaccaagggcttcctcaagaagtattgaatgaaaatttgctgcgtttcttcgtcgctcctttcccagaggtttttggaaaagaaaaagtaaacgaattgtccaaagatatcggctccgaatcaacagaagatcaggctatggaagatatcaagcagatggaagcagaatcaataagctctagtgaggaaatcgtcccaaacagcgtagagcaaaagcatatccagaaggaagatgtgccttccgagcgctatctcggctatttggaacaactgttgcgcttgaaaaagtataaagtacctcaactcgaaatagtgcctaactctgctgaagaacgcttgcactccatgaaagaaggaatacatgcacagcagaaagagcctatgataggcgtcaatcaggaactggcttacttttacccagagctttttcgtcaattttatcaactggacgcatatccctctggagcatggtactatgtcccccttggaacacagtacactgatgccccatcattctccgacattcctaaccctatcggtagtgaaaactctgaaaagaccacaatgcctttgtgg

SEQ ID NO: 12 - DNA, 642 bp, synthetic construct
  source 1..642: mol_type = other DNA
atgaagctgcttatactgacctgtcttgtggcagttgccctcgcacgccctaaacaccctattaaacatcagggactccctcaggaagttttgaacgagaacctgctccgcttcttcgtagctccctttccagaggtttttgggaaggaaaaggtaaacgaactttccaaagacataggaagcgaatctactgaggatcaagctatggaggacatcaagcagatggaagctgagtcaatttcttcttcagaggaaatcgtacccaattcagtagagcagaagcatatacagaaggaggacgtaccttctgagaggtatctcgggtatctcgaacagctcctgagactcaaaaagtacaaggttccacagttggagatagtacccaactctgcagaggaacgtttgcactctatgaaggaggggatacacgcccaacaaaaggagcctatgattggcgtgaatcaagaattggcatacttctaccccgaactgttcaggcaattctaccaactcgacgcctatccatcaggtgcctggtactacgttccattgggaacccagtacactgacgcaccatctttctctgacatccccaaccccataggttctgaaaactctgagaagaccactatgccactttgg

SEQ ID NO: 13 - DNA, 642 bp, synthetic construct
  source 1..642: mol_type = other DNA
atgaagttgcttatactgacttgcctcgtcgccgttgcactggcaaggcccaaacatcctattaaacatcagggattgccacaggaagtgcttaacgagaacctcctgcgttttttcgtagcacccttcccagaagtgtttggcaaagaaaaagtaaatgaacttagcaaggacataggctcagaatcaactgaggatcaagccatggaggacatcaaacaaatggaagctgagagtatatctagctcagaagagattgtgcctaacagcgtagaacaaaagcatattcagaaagaggatgttccttcagagcgttatcttgggtacctcgagcaactgcttaggttgaaaaagtacaaagtccctcaattggagatcgttccaaacagtgccgaggagaggctccacagtatgaaggagggaatccacgctcaacaaaaggaacccatgattggtgttaatcaggagcttgcttacttttatccagagctgttccgccaattttatcagctggatgcctacccaagcggcgcttggtattatgtcccactgggtactcagtacaccgacgccccaagtttttccgacatacccaatcctattgggagcgaaaattctgagaagaccaccatgcccctgtgg

SEQ ID NO: 14 - DNA, 642 bp, synthetic construct
  source 1..642: mol_type = other DNA
atgaaactccttatcctcacttgcctcgttgctgtcgctctggcaagaccaaaacaccctataaagcatcaggggttgccacaagaggtcctgaatgagaatttgcttaggttctttgtagcccctttcccagaagttttcgggaaagaaaaggttaacgaactctccaaggatattggatctgagtcaactgaagaccaggccatggaagacataaaacagatggaggctgagtccatcagttccagtgaagaaatagtaccaaactctgtcgaacagaagcacattcagaaagaagatgttccttccgagaggtatcttgggtatctggaacagctcctcaggctcaagaaatacaaggtaccacagttggagatcgttcccaattcagccgaagagagattgcattctatgaaggagggcattcatgcccagcaaaaagagccaatgataggggtgaaccaagagttggcttacttctatccagagctgtttcgccagttctatcaactcgatgcctaccccagcggtgcttggtattatgtgcctctgggtacccaatacacagacgctccctcttttagtgatattcctaaccctattgggtccgagaacagcgaaaaaactacaatgcctctctgg

SEQ ID NO: 15 - DNA, 642 bp, synthetic construct
  source 1..642: mol_type = other DNA
atgaagctgctgatacttacctgtcttgtcgccgtggccctcgctagaccaaaacatccaataaagcaccagggcctcccccaggaggtcttgaacgaaaacctgctccgttttttcgttgccccttttcccgaagtgttcggcaaggaaaaagtcaacgaattgtccaaagatattggatcagagagtacagaagatcaagctatggaggatattaaacaaatggaggctgagtcaattagctcatccgaagagatagtacccaattcagtagaacaaaaacacattcaaaaagaggatgttccaagcgagagataccttggctacctcgaacagcttcttagactgaagaagtacaaagttccacagttggagattgttccaaattccgctgaagaaagacttcattccatgaaggagggcattcatgcacagcagaaggaacccatgataggagtaaaccaagagctcgcatatttttacccagagttgtttcgccagttctatcagttggacgcttaccccagcggagcatggtactacgttccccttggtactcaatatactgatgccccttccttttctgatatacccaatcccattggttctgagaactcagagaagaccactatgcctctttgg

SEQ ID NO: 16 - DNA, 642 bp, synthetic construct
  source 1..642: mol_type = other DNA
atgaaactgttgatacttacctgtcttgttgccgttgcccttgccagacctaaacatcccattaaacaccaaggactccctcaagaggtactcaatgagaatctgttgagatttttcgtagccccctttcctgaagtctttggaaaggaaaaagtcaatgaactctctaaggacattggtagtgaaagcactgaggaccaagctatggaagatataaagcaaatggaggccgaaagcatctcatcttcagaagagatagtaccaaacagtgttgaacaaaagcatatccagaaagaggatgtgccttctgagagatatcttgggtatctggaacaactgctgagactcaagaaatataaagtaccccaattggaaatagtacctaattccgccgaggagaggcttcattctatgaaggagggcattcatgcccaacaaaaggaacctatgattggtgtgaaccaggaactcgcatatttttatcctgaactctttcgtcaattttaccagctcgacgcataccccagtggtgcatggtattatgtccctcttggaacacaatataccgacgcaccatcattctcagacatacccaacccaatagggtcagaaaacagtgagaaaaccactatgcctttgtgg

SEQ ID NO: 17 - DNA, 642 bp, synthetic construct
  source 1..642: mol_type = other DNA
atgaagctgctcatcctgacatgtctggttgctgttgctttggcacgccccaaacaccccataaaacaccaagggcttccccaagaggtgctgaacgaaaatctcctgcgcttttttgtggcaccctttcccgaggtatttggcaaggaaaaggtaaatgaactcagtaaagacataggtagcgaatctacagaagatcaagcaatggaggacatcaagcaaatggaagcagagtcaattagctcatctgaggagattgtacccaacagtgtggaacaaaaacatatccagaaagaggacgtcccaagtgagcgttatttggggtatttggaacagttgctgaggctcaaaaaatacaaggtgcctcagcttgaaatagtaccaaacagtgcagaagaacgtttgcattccatgaaagagggcattcacgcacagcagaaagagccaatgatcggagtaaatcaagaactcgcctacttctatcccgagctcttcagacaattctaccaacttgatgcatacccatctggcgcatggtattacgtgcctcttggaacacaatacacagacgcccccagctttagcgacattcctaacccaatcggttctgaaaacagcgagaagaccactatgccattgtgg

SEQ ID NO: 18 - DNA, 642 bp, synthetic construct
  source 1..642: mol_type = other DNA
atgaagttgctcattctgacctgtctggtcgcagttgccctggcaagaccaaaacatcccattaaacatcaagggcttccacaagaggtattgaatgaaaatctcttgcgcttttttgtggcaccatttcctgaggtgtttgggaaggaaaaggtcaatgagctgtcaaaggatatagggtctgaatcaactgaagatcaggcaatggaagatatcaaacagatggaggcagaatccatcagtagctcagaggaaatcgttcctaattctgtggagcaaaagcatattcaaaaggaagatgtgccctccgagcgctaccttggatatcttgagcagctcttgaggttgaaaaaatacaaagtgccccaacttgaaatagtgcctaactccgcagaagagagacttcactcaatgaaagaaggtattcacgctcaacaaaaagagcctatgattggtgtgaatcaagagctcgcttacttttaccctgaacttttccgtcaattctatcaactggatgcttatccttctggggcttggtactacgtgccccttggaactcaatacaccgacgctcctagtttcagtgatatacccaatccaattggtagtgagaacagtgaaaaaactaccatgccattgtgg

SEQ ID NO: 19 - DNA, 642 bp, synthetic construct
  source 1..642: mol_type = other DNA
atgaagttgcttatactgacttgtttggttgctgtcgccttggcaaggcctaaacaccccatcaagcaccaagggttgccacaggaggtgctgaacgagaatctgctgcgcttcttcgtagcaccttttcctgaggtgtttggcaaggagaaggtaaacgagttgtccaaggacattggctcagaatccaccgaagatcaggcaatggaggacatcaagcagatggaagccgagagcatctcaagcagtgaggaaatagtacctaattcagtcgagcaaaagcacattcagaaggaggatgtgccatctgagagatacctcgggtatctggagcaacttctcaggttgaaaaagtacaaagtgccacagttggaaatcgtacctaattctgcagaagaaaggcttcacagcatgaaagaaggtatacacgctcaacaaaaagagcccatgatcggtgtcaaccaagagctggcatacttttacccagagttgtttaggcagttctaccagctcgacgcatatccatcaggggcatggtactacgttccacttggcactcagtatacagatgccccttcattctccgacatccctaaccctatcggttcagaaaacagtgagaagacaaccatgccactctgg

SEQ ID NO: 20 - DNA, 642 bp, synthetic construct
  source 1..642: mol_type = other DNA
atgaagttgctgatcttgacctgcctcgtcgctgtagcactcgcccgccctaagcaccctattaagcatcaaggactgccccaagaagttttgaatgagaatctcctccgtttcttcgtggccccttttcctgaggtctttggaaaagagaaagtaaatgagctgagtaaagacatcggctcagaatctacagaagaccaagcaatggaggatatcaagcaaatggaagctgaaagcatctccagcagtgaggaaatcgtgcctaattctgtagagcaaaagcatatccaaaaggaggacgtcccctcagagaggtatttgggctatctcgaacagctgcttaggttgaaaaaatacaaagtgccccaactggaaatagtgcctaattctgccgaggagagactgcacagtatgaaggaggggatacatgcacagcaaaaagaacccatgatcggcgtaaaccaagagctggcatacttctacccagaacttttccgtcaattctatcagctcgacgcataccccagtggcgcatggtactatgtgcctctcggcacacagtacaccgatgcaccatcctttagcgacattcctaaccccattgggagcgaaaacagtgaaaagaccacaatgccactttgg

SEQ ID NO: 21 - DNA, 642 bp, synthetic construct
  source 1..642: mol_type = other DNA
atgaaactcctcatccttacctgccttgtggctgtcgctctcgcacgtcccaaacatcctatcaagcaccaaggcctgccacaggaagtacttaatgaaaatttgcttcgttttttcgtagcaccatttcctgaagttttcgggaaagaaaaagtgaacgaactgtccaaggatataggcagtgaatcaactgaagaccaagctatggaagatataaaacagatggaagccgagtcaatctcttcctcagaggaaatagtccctaatagcgtagaacaaaagcatatccaaaaagaggatgtaccctccgaaaggtatttgggatacctggaacaactgcttaggcttaaaaagtataaggttcctcagttggaaatagtgcccaattctgccgaggagagactgcatagcatgaaagagggaatccacgcacaacaaaaggaacccatgataggggtaaaccaagagcttgcttatttctaccccgagctcttcaggcagttctatcaacttgacgcctatcctagtggcgcttggtactatgtgcccctcggaactcaatataccgatgcacccagcttctctgatatacccaaccctataggcagcgagaactcagagaaaacaacaatgcccttgtgg

SEQ ID NO: 22 - DNA, 642 bp, synthetic construct
  source 1..642: mol_type = other DNA
atgaagctgttgatacttacttgtctggtagccgtagcactcgctcgtcccaaacatccaatcaagcatcagggacttccccaagaagtgctcaacgaaaatctgttgcgcttttttgtggctccattcccagaggtgtttggaaaagagaaagtcaacgagctgtcaaaggatatcggctctgagagtacagaagatcaggcaatggaggacatcaagcagatggaggcagaatctatatctagctctgaggagattgtgcctaatagtgtggagcaaaaacatattcagaaggaagacgtgccatcagaaagatatcttgggtacctggagcagcttctcaggttgaaaaaatacaaggtcccccaacttgagatagtgcccaactctgccgaggaaaggttgcatagtatgaaagagggaatccatgcacagcaaaaagaacctatgatcggagtgaatcaggagttggcttacttttaccctgaactcttcagacagttctatcagctcgacgcatatccttctggtgcctggtattatgttcccctcggtacccaatatacagacgctccatcctttagcgacattcccaatcccatagggtctgaaaatagcgagaaaaccaccatgccactgtgg

SEQ ID NO: 23 - DNA, 642 bp, synthetic construct
  source 1..642: mol_type = other DNA
atgaagttgctgattttgacttgcttggtagcagttgctcttgcccgcccaaagcatcccattaaacatcaagggctgccccaggaagtattgaatgaaaatcttctgcgcttttttgtggctccctttccagaggtgtttgggaaagagaaagtgaatgaattgtcaaaggatattggaagtgagagtacagaggatcaggctatggaggatattaagcagatggaggcagagagtatcagtagcagcgaagaaatagttcccaacagcgtcgagcaaaaacacatccagaaagaggatgtgcctagcgagcgctacctgggatacctggagcagttgctcaggctcaaaaaatataaagttcctcaactggaaatcgtacctaatagcgcagaggagagactgcattctatgaaggaaggaatacatgctcaacagaaggaaccaatgattggtgtgaaccaagaacttgcctatttttacccagaactgtttcgtcagttttaccaactcgatgcttatccctctggggcctggtactatgtcccccttgggactcagtacaccgacgctcctagcttttccgatataccaaatccaataggatccgaaaatagtgaaaagactactatgccactttgg

SEQ ID NO: 24 - DNA, 642 bp, synthetic construct
  source 1..642: mol_type = other DNA
atgaaactcttgatcttgacctgcctggtagcagtggccctcgccagacctaaacatcccattaagcaccagggcctgccacaggaggtcctcaacgaaaacctccttcgtttctttgttgcccccttccccgaggtcttcggaaaagagaaggtgaacgagctgtctaaggacatcggcagcgaaagcactgaagatcaagctatggaggacattaaacagatggaagccgagagtatttcttcaagtgaggagattgtccccaactccgttgagcaaaagcatatacagaaggaggacgtccccagcgaaaggtacctgggatacttggaacaactgctccgtctcaagaagtacaaagtgcctcaactggagatagtacctaactctgccgaggaacgcttgcattccatgaaggagggtatccacgctcaacagaaagagcccatgattggtgtaaaccaagaactcgcttatttctaccccgaactgttccgtcaattttatcagcttgacgcttacccaagcggtgcctggtactacgttcctctgggcacacagtatacagatgcaccttcattcagcgacattcctaacccaatcggcagtgaaaactccgaaaagactacaatgcccctctgg

SEQ ID NO: 25 - DNA, 642 bp, synthetic construct
  source 1..642: mol_type = other DNA
atgaagctgttgattctcacatgccttgttgcagtcgcattggctcgccctaagcaccctataaagcatcagggcctgccccaggaggtacttaatgaaaatcttctgagattcttcgtggcaccctttccagaagtctttggaaaggagaaggtgaacgagctgtccaaagacataggtagtgaatctactgaagatcaggctatggaagacatcaaacaaatggaagctgagtccatttccagctcagaagagatagtgcctaatagtgtagaacagaagcacatccagaaagaggacgttcctagcgagcgctacctcggctatctggaacagttgctccgcctgaaaaagtacaaggttcctcagttggaaatagtccctaattcagcagaagaacgtcttcatagcatgaaggaaggaatccacgcacaacagaaagaaccaatgatcggcgtgaatcaggagttggcatatttttaccctgaactttttcgccagttctaccaactggatgcctatccttccggtgcttggtactatgtgccactcggcacccaatatacagatgctccatctttttccgacattcccaatccaatcgggagtgaaaactctgagaagactacaatgcctttgtgg

SEQ ID NO: 26 - DNA, 642 bp, synthetic construct
  source 1..642: mol_type = other DNA
atgaaactcttgatattgacctgcctggtagcagtggctttggcacgccctaagcaccccattaagcaccaaggactccctcaggaagttttgaatgaaaatctgttgcgtttctttgtggcaccttttcctgaagtcttcgggaaggaaaaagtcaacgaacttagtaaagatattggatcagagtcaaccgaggatcaagctatggaagatataaaacaaatggaggctgagtctatcagctctagcgaagaaatcgtccccaattctgtagaacaaaagcatatacagaaggaggacgttccctcagagagatacctgggatatttggaacagttgctcaggttgaaaaagtacaaagtaccacagctcgaaatagtgcccaattcagccgaggaaaggttgcatagtatgaaggaaggcatccacgcccagcaaaaagagccaatgataggggtcaaccaggagctggcctacttttaccccgagctctttaggcagttctatcaactcgatgcctatccttcaggggcttggtactatgtccctttgggtacccaatacaccgacgcaccctcttttagcgacatccccaatcctatagggagtgaaaatagcgaaaaaacaacaatgccactttgg

SEQ ID NO: 27 - DNA, 642 bp, synthetic construct
  source 1..642: mol_type = other DNA
atgaaattgttgatattgacttgtttggttgcagttgctctcgcacgcccaaaacatcccattaagcaccagggcctgccacaggaagtgctcaacgagaacctcctccgtttttttgtagctccctttccagaggtattcggtaaggagaaagtcaatgaactctcaaaagatatcgggagtgaaagtactgaagatcaagcaatggaggatattaagcaaatggaagccgaatcaatatcttctagtgaggaaattgtacccaactcagtagaacagaagcatatacaaaaggaggatgtcccttccgaaaggtacttgggctacttggaacaacttctgcgtctcaaaaagtacaaggtcccacagctcgaaattgtccccaatagtgctgaggagagacttcacagtatgaaggagggcattcatgcacagcaaaaggagccaatgattggagtcaaccaggaactggcctatttttatccagaactgtttcgtcagttttaccagctggatgcatacccctcaggtgcctggtactatgtccctctcggcactcaatacacagacgccccctcttttagtgatatacctaaccctatcggatctgagaactctgaaaaaaccactatgcccctttgg

SEQ ID NO: 28 - DNA, 642 bp, synthetic construct
  source 1..642: mol_type = other DNA
atgaagttgttgatattgacttgcttggtagccgtggctctggcccgccctaaacatcccataaagcaccaggggttgccacaagaggttctcaacgaaaatttgcttagattctttgttgccccatttccagaggttttcgggaaagagaaggtaaatgagttgagtaaagacatcggaagcgaaagcactgaagatcaagccatggaggacatcaaacaaatggaagccgaatctatatcctcctcagaagaaatcgtaccaaacagtgtcgagcaaaaacatatacagaaagaagacgtaccctcagaacgctaccttgggtacttggagcaactcctccgtttgaaaaagtataaagttccccaactggagattgttcccaatagcgctgaagaaaggctgcactctatgaaggaaggtattcacgcacagcagaaggagcctatgattggtgtcaatcaggaactggcatatttctaccctgagctgttccgtcagttttaccaacttgacgcttacccatctggggcatggtattacgtgcccttggggacccaatacaccgacgcccccagcttcagtgatattcccaaccctatagggtctgaaaattcagaaaaaaccacaatgcctttgtgg

SEQ ID NO: 29 - DNA, 642 bp, synthetic construct
  source 1..642: mol_type = other DNA
atgaagctccttatcctcacctgtttggtagcagtcgcactcgcaagacctaagcatcctatcaaacatcagggtctccctcaagaggtcctcaatgaaaacttgttgcgtttctttgttgcacctttcccagaggtcttcggcaaggagaaggtcaacgaactttccaaggacatagggtcagagtcaaccgaagatcaagccatggaggacatcaaacaaatggaggctgagagtatatcaagtagcgaagagatagtgcctaacagcgttgagcagaagcacatacagaaggaagacgtgccctcagaaaggtacctgggctacctcgaacagcttcttcgtctcaaaaagtataaggttcctcaattggagatagtaccaaatagcgccgaggaaagattgcattcaatgaaagagggaatccatgcccagcaaaaagagccaatgattggtgtaaaccaggaattggcttatttctaccctgaactgttcaggcaattttaccaattggatgcctatccttccggggcatggtactatgtgccccttggcacacaatacacagatgccccttctttctcagatattccaaatcctatcggcagcgaaaactctgagaaaaccactatgcctttgtgg

SEQ ID NO: 30 - DNA, 642 bp, synthetic construct
  source 1..642: mol_type = other DNA
atgaagctcctcatcctcacctgtttggtggctgtagccttggcacgccctaagcatcccataaaacaccaggggctgccacaggaagttctcaatgaaaaccttctgaggttctttgtggctccttttcccgaagtgtttggcaaggaaaaagtcaatgagctttctaaagacataggctctgaatctactgaggaccaagctatggaagacattaaacagatggaggcagagagtatctccagcagtgaggaaattgttcccaacagcgtggagcaaaaacatattcagaaagaagatgtaccttccgagcgttatctcggttatcttgagcagcttcttcgccttaagaagtacaaagtcccccagcttgaaatagttcctaactcagccgaggagagactgcattccatgaaggaaggcatacacgcacaacaaaaagaacccatgattggcgttaatcaggaattggcttacttctatccagagctgtttcgccaattctatcagctcgatgcttacccttctggtgcttggtactatgtacctttgggtactcagtatacagacgcccctagttttagtgacatacccaatccaatcggcagcgaaaacagcgagaagactaccatgcctttgtgg

SEQ ID NO: 31 - DNA, 642 bp, synthetic construct
  source 1..642: mol_type = other DNA
atgaaactcctgatcttgacctgccttgtggccgttgctctcgcacgcccaaaacatcccatcaaacatcagggactccctcaagaagtactgaatgaaaacctcttgagattttttgttgcaccattccctgaggtttttggtaaagagaaggttaatgaattgagcaaagatatagggtccgagagtactgaagatcaggctatggaagacattaaacaaatggaggccgagagtattagtagttccgaagagatagtgcctaacagtgtagagcagaagcacatacagaaagaggatgttccctcagagagatatttgggatacttggaacagttgctcagactgaagaaatacaaggttccccagttggaaatagtccctaattccgccgaagaaaggcttcactcaatgaaggaaggtatccatgctcagcaaaaagagcctatgataggtgttaatcaagaacttgcctatttttaccctgagttgttccgccagttttaccaattggatgcatatcctagtggggcctggtactatgtccctctcggcacacaatacaccgacgccccaagtttcagcgatatacccaaccccataggttccgagaatagtgagaaaactaccatgcctctttgg

SEQ ID NO: 32 - DNA, 642 bp, synthetic construct
  source 1..642: mol_type = other DNA
atgaagctcctcatacttacttgcctcgttgctgtcgcactggctcgtccaaagcaccccatcaaacaccagggtcttccccaggaagtcttgaatgaaaatttgctgaggttcttcgttgctccttttcccgaagtgttcggtaaagaaaaggtcaacgaattgtcaaaggacattggctctgaaagcactgaggaccaagctatggaagatataaagcagatggaggcagagtccatttcaagttctgaggaaatagtcccaaactctgtggagcagaagcacatacaaaaggaagatgttcccagtgaacgctacttgggatatctggagcagttgctgaggttgaagaaatacaaggttccccaattggaaatagtacccaacagtgcagaagagagactgcacagcatgaaggagggaatccacgcccaacagaaggagcccatgataggtgtgaaccaagaattggcatatttttacccagaactctttaggcagttttatcagttggatgcctatcccagtggggcttggtattacgttccccttgggactcaatacaccgacgctccaagtttttctgacattcctaaccccataggaagtgaaaattcagaaaagaccacaatgcctctttgg

SEQ ID NO: 33 - DNA, 642 bp, synthetic construct
  source 1..642: mol_type = other DNA
atgaagcttcttattcttacctgcctggtggctgtggccctcgccagacccaaacacccaataaagcaccaagggcttccacaggaagttctcaacgaaaaccttctgcgcttttttgtggctcctttccccgaggtatttggtaaggagaaagtcaatgaactgtctaaggatattggaagtgaatcaaccgaggatcaagctatggaggatatcaaacaaatggaggcagagtccattagctcatcagaggaaattgtccccaacagcgtcgagcagaaacacatccagaaggaagatgtccccagtgaaaggtatctgggatacttggagcaactcttgagattgaagaaatacaaagtaccacaactcgaaatcgtccccaatagtgccgaagagagattgcactccatgaaggagggtatccacgcacaacaaaaggagcccatgatcggagtcaaccaagaactcgcttatttctaccccgaacttttcagacagttttaccaactggatgcctacccttcaggggcttggtattatgtacctctcggtacccagtacaccgatgctcctagcttttcagatattccaaaccctattggcagcgaaaactcagaaaagacaactatgccactgtgg

SEQ ID NO: 34 - DNA, 642 bp, synthetic construct
  source 1..642: mol_type = other DNA
atgaaattgcttattctcacttgtctcgttgctgtggcacttgctcgccctaagcatccaatcaagcatcagggattgccacaggaggtcctgaacgaaaacctgctgcgcttttttgtcgcacctttccccgaagttttcggaaaagaaaaagtgaatgagttgagtaaagatataggcagcgaatccaccgaagaccaagcaatggaagatataaagcagatggaagccgaaagtatatcctcatctgaggagatcgtcccaaattcagttgaacagaagcacattcagaaagaggacgttccttctgaaagatatttgggttacctggagcaactgcttagactcaagaaatataaagtaccccaactggaaatcgtgccaaacagcgccgaagagcgcctgcattcaatgaaagagggaattcacgcacaacagaaagaacctatgataggggtcaatcaggaacttgcatatttttaccccgaactctttcgccaattctatcagttggacgcttatccatccggagcctggtattacgtaccactgggaacccaatacaccgacgctccctcatttagcgatatacctaatccaatcgggtcagagaactcagagaagacaacaatgccactttgg

SEQ ID NO: 35 - DNA, 642 bp, synthetic construct
  source 1..642: mol_type = other DNA
atgaaacttctgatcctgacttgtctcgtagctgttgccctggccagacccaagcaccctattaagcatcaaggccttccccaagaagtattgaatgagaatcttctcaggttcttcgtagcccctttcccagaagtatttggaaaagaaaaagtcaacgagttgtccaaagacattggcagcgaaagtaccgaggaccaagcaatggaagacattaagcagatggaggcagagtcaatcagtagttctgaagaaatcgtgcccaactccgttgagcaaaagcacatccaaaaggaagatgtcccctcagagcgttacttggggtacttggaacagttgctccgcttgaagaaatacaaggtgccacaattggagattgtacctaattccgcagaagagagactgcactcaatgaaagagggaatacatgcacagcaaaaggagccaatgatcggcgtgaaccaggaattggcttacttttacccagagttgttccgtcaattttaccagcttgacgcttatcccagtggagcctggtactatgttccactcggaacccaatacacagacgcaccttcattttctgacattcccaaccccatagggtcagagaattccgagaagactactatgccattgtgg

SEQ ID NO: 36 - DNA, 642 bp, synthetic construct
  source 1..642: mol_type = other DNA
atgaagcttctcattcttacctgtctggtcgccgtggcacttgcacgtccaaagcatcctatcaagcaccaaggactcccacaagaagtgctgaacgaaaaccttttgcgctttttcgtagcaccatttcccgaggtctttggaaaggaaaaagttaacgagttgagcaaggacatcggcagtgagtctacagaggatcaagcaatggaagacattaaacaaatggaggctgagtcaatctcatcaagcgaggagatcgtcccaaactccgttgagcaaaagcatatacaaaaagaagacgtgccctcagaaaggtacttgggctatttggagcagctccttaggttgaaaaagtacaaggtcccccagttggagattgttcccaatagtgcagaagagcgccttcactctatgaaagagggaattcatgctcagcaaaaggagccaatgataggtgtcaaccaggaactggcctatttttacccagaattgttcaggcagttctaccagttggacgcatatccttccggtgcctggtactacgttcctttgggcactcagtacaccgacgcccctagcttttctgacatacccaatccaatcggttctgagaattctgagaaaaccacaatgcctctgtgg

SEQ ID NO: 37 - DNA, 642 bp, synthetic construct
  source 1..642: mol_type = other DNA
atgaaacttcttattctcacctgtctcgttgccgtagctctcgctagacctaagcaccccatcaagcaccagggactgccacaagaggtccttaacgagaatctcttgagattttttgtcgctccatttcctgaggtgtttggtaaggaaaaagtcaacgagctcagtaaagacataggttcagagtccactgaggaccaggccatggaggacataaagcagatggaagccgaaagtataagtagcagcgaagagatcgtgcctaactctgtggagcagaaacatattcagaaggaagatgtgccttccgaaaggtacttgggctatttggagcagctgcttcgtttgaaaaagtataaggtcccccaactggaaattgtgccaaactcagctgaagaaaggttgcattccatgaaggagggaatacatgctcaacagaaagaacctatgattggggtaaaccaggagctggcatatttttaccccgaactctttaggcaattttaccaactggatgcttaccctagtggtgcttggtattacgtaccactcggaacacagtacaccgacgcaccttccttctctgatatcccaaaccccatcggaagtgagaatagcgagaagacaaccatgcccctctgg

SEQ ID NO: 38 - DNA, 642 bp, synthetic construct
  source 1..642: mol_type = other DNA
atgaaactgctcatactgacctgtctggtcgctgtcgctcttgcaaggcccaaacaccccatcaagcaccaaggtctgccccaagaggtactcaatgagaatttgttgcgcttcttcgtggcccctttccctgaagtatttggtaaagaaaaggtgaacgagcttagtaaagatattgggtctgagagcactgaggaccaggccatggaagatattaaacaaatggaagccgaatctatctcctcctccgaggaaattgtccctaatagtgtggagcagaagcatatccaaaaagaagatgtaccatccgaacgttatttgggctacctcgagcagcttctcagactcaaaaagtacaaagtgccccagcttgagatagtgcccaactccgctgaagaacgtctccatagcatgaaagaaggcatacacgcacagcagaaggaacccatgatcggagtaaatcaagaactggcatacttctatccagagcttttccgccaattttaccaactcgacgcatacccttccggtgcctggtactacgttccccttggaacccaatacacagacgctccatccttttctgatataccaaaccccatcgggtcagagaatagtgagaagactaccatgcccctgtgg

SEQ ID NO: 39 - DNA, 642 bp, synthetic construct
  source 1..642: mol_type = other DNA
atgaaactgttgatcttgacctgcttggttgccgttgccctcgctcgtcccaaacatcccatcaaacatcaggggctgccccaagaggtgcttaacgaaaacctgctcaggttctttgtcgcaccatttcccgaagtgttcggtaaggagaaggttaatgaactgagcaaggacatcggttcagagtcaactgaggatcaggctatggaggatattaaacagatggaagccgaatccatctcatccagcgaggagatagtccctaactctgtcgagcaaaaacatatacagaaggaggatgtgccaagtgagcgctatctcggttacctcgaacagttgctgagactgaaaaaatataaggtcccccagctcgaaatcgttccaaattcagctgaggagaggcttcacagtatgaaagagggtattcatgcccagcagaaggaacccatgattggagtaaaccaagagctggcttacttttatcctgaattgttccgtcaattttaccaacttgatgcttatcccagtggcgcatggtattatgtacccctcggaactcagtacaccgacgctccaagctttagtgatataccaaatccaatcgggtccgagaatagcgagaaaactaccatgcctttgtgg

SEQ ID NO: 40 - DNA, 642 bp, synthetic construct
  source 1..642: mol_type = other DNA
atgaaactgttgatccttacctgcttggttgcagtagcactcgctcgtccaaaacatcctattaagcaccagggcctcccccaggaggtactgaacgaaaatctccttaggttttttgtagcaccattcccagaggtctttggtaaagagaaagtcaacgaactgtcaaaggatatagggtccgaatctacagaagaccaagcaatggaagatattaaacaaatggaggcagagagcatatcatcaagcgaagaaattgtacctaattccgtagaacagaagcatatccagaaggaagacgttccatccgaaaggtacctcggttacttggagcaattgctgcgtttgaagaaatataaggtacctcaactcgaaattgtccccaattctgccgaagagcgcctgcacagcatgaaagagggtatccatgcccagcaaaaagagccaatgattggcgttaaccaagagcttgcctatttttaccccgaactctttagacagttttatcagctcgacgcttatccctccggggcctggtattatgtaccactggggactcaatacaccgacgcaccctccttcagtgacattcccaatcccataggttccgagaactcagaaaaaactacaatgccattgtgg

SEQ ID NO: 41 - DNA, 642 bp, synthetic construct
  source 1..642: mol_type = other DNA
atgaaattgctgatcctcacttgccttgtggccgtcgcattggcacgtcccaaacatcctattaaacaccaaggactgcctcaggaggtacttaacgagaacctcctgcgcttttttgtagcaccattcccagaagtgtttggcaaggaaaaggtaaacgaactctctaaggatatcggcagtgaaagcactgaagatcaggcaatggaagacatcaagcaaatggaggccgaatctataagttcctccgaggaaattgttccaaattccgtagagcagaaacatattcaaaaagaagacgtgccatctgagaggtacctcggttacctggagcagctgctccgccttaaaaagtacaaagtgccacaacttgagatagttcccaactccgctgaagagagactccattcaatgaaggagggcatacacgcacagcagaaagagcccatgattggtgtcaatcaggagcttgcctatttttaccccgaacttttcaggcaattctatcagctggatgcctatccaagtggtgcctggtactacgtgcctctcggaacccaatatacagacgctccaagctttagtgacattcccaacccaataggaagtgaaaattctgagaagactaccatgcctctctgg

SEQ ID NO: 42 - DNA, 642 bp, synthetic construct
  source 1..642: mol_type = other DNA
atgaaacttttgatactgacatgcctggttgctgttgctttggctagacccaaacacccaattaaacatcaaggtctccctcaagaggtccttaatgaaaacctcctgagattcttcgttgcaccctttcctgaagtgtttggaaaagagaaagtaaacgagttgagtaaagacataggtagcgagtctactgaggatcaagctatggaagatattaaacaaatggaagcagaatctatttcctcttccgaagaaatcgtccctaatagcgttgaacaaaaacatatacagaaggaagatgtgccctcagagcgttaccttggatatcttgaacagctgctgcgtctgaagaagtataaagtgccccagctggaaatagttcctaattcagccgaagaacgtctgcacagtatgaaggagggtatccatgctcagcagaaggaacccatgattggcgttaatcaggaacttgcatatttctaccccgagctctttagacagttttatcagcttgacgcatatccttctggggcatggtactatgtaccactgggaactcaatacaccgatgcacctagtttctctgatatcccaaacccaataggttctgagaatagtgaaaaaactaccatgcccttgtgg

SEQ ID NO: 43 - DNA, 642 bp, synthetic construct
  source 1..642: mol_type = other DNA
atgaagctccttattttgacatgccttgtcgcagtggccttggctcgtccaaaacatcctataaagcatcaaggattgccacaagaagtactgaatgagaaccttctccgcttctttgttgcaccatttcctgaagtgttcggcaaggaaaaagtaaacgagttgagtaaggatattggcagcgaatccactgaggatcaagctatggaagacataaaacaaatggaagctgaatccatatccagctctgaagaaatagtacctaattcagtcgagcagaaacatattcaaaaggaagacgtaccctcagagcgttaccttggttatctggagcagctgcttagactgaagaagtacaaagtcccacaactggagatagtgcctaatagtgctgaagagcgtctgcacagtatgaaggagggcatccacgctcagcagaaagaacctatgataggggtcaatcaagaactcgcatacttctatcccgaattgttccgtcaattttatcaacttgacgcctacccttctggtgcctggtattatgtacccctcgggacacaatatacagatgctccttcattctcagacattcccaacccaataggttctgagaatagcgagaaaactactatgcccttgtgg

SEQ ID NO: 44 - DNA, 642 bp, synthetic construct
  source 1..642: mol_type = other DNA
atgaaactcctcatcctcacttgtctcgttgccgtggcccttgctcgtcccaagcacccaataaaacaccaaggcttgccccaggaagtcttgaatgagaatcttcttaggtttttcgtagctcccttcccagaggtcttcggcaaagaaaaggttaacgagctgtccaaagatattggaagtgaatctactgaggatcaggcaatggaagatataaagcagatggaggctgagagtatatcctcaagcgaggaaattgtgcccaattccgttgaacagaaacatatacagaaagaggatgtccctagtgagagataccttggatacctggaacaactcttgcgtttgaaaaaatacaaagttcctcaactcgaaattgtacctaattctgctgaggagcgtcttcattccatgaaggaggggattcatgcacaacagaaggagcctatgatcggtgtaaaccaggagcttgcttacttttaccccgagttgttccgtcagttttatcaactggacgcttatcccagcggcgcatggtattacgttcctttggggacccagtacacagacgctccatcttttagcgatatccctaacccaattggaagtgaaaatagcgaaaaaactactatgccactgtgg

SEQ ID NO: 45 - DNA, 642 bp, synthetic construct
  source 1..642: mol_type = other DNA
atgaaactcctcatccttacttgtctcgttgctgtggctcttgctagacctaagcatcctataaagcatcaagggctcccacaggaggttctgaacgaaaatctcctgcgctttttcgtggcacccttcccagaggtattcggtaaagagaaggtaaacgaactcagtaaagatatagggagtgaatcaacagaagaccaagctatggaagatataaagcagatggaggccgagagtattagttcttccgaagagattgtccccaacagcgtggagcagaaacacattcaaaaggaagatgtaccaagcgaaaggtatttgggatacctcgagcagctcctcagactcaaaaagtataaggtacctcagctcgagatagtgcccaatagtgcagaagaacgtttgcattctatgaaagagggcatccatgcccagcaaaaagagccaatgattggtgttaatcaagagcttgcatacttctatcccgagctgtttcgtcagttctatcaactcgacgcttacccatcaggcgcatggtattacgtgcctttgggtactcaatatacagacgccccatccttttcagacatcccaaacccaatagggagcgaaaattccgaaaagacaaccatgccactgtgg

SEQ ID NO: 46 - DNA, 642 bp, synthetic construct
  source 1..642: mol_type = other DNA
atgaaacttctcattcttacatgcctcgtggctgttgctctcgcacgtcctaaacaccctatcaagcaccaaggactcccacaagaagtccttaatgaaaacttgctccgcttttttgtagcacctttcccagaagtgttcggcaaagagaaggtcaacgaactgtcaaaggacataggttccgaaagtactgaagaccaggcaatggaagacataaaacaaatggaagcagagtcaatatctagctcagaagaaatcgtccctaacagcgtcgaacagaaacatattcagaaggaagatgtgccttctgagaggtatcttgggtacttggagcaacttctgaggctcaagaagtacaaagttccccagttggagattgtgccaaactccgccgaagagcgcttgcacagcatgaaagaaggtatacacgctcaacaaaaggagccaatgataggagtaaaccaagagctcgcatatttttatccagaactttttcgtcagttttaccaactggacgcatacccttcaggagcatggtattatgtccctctcggcacccaatacacagacgcaccttcattcagcgacatcccaaaccccatagggagcgaaaattctgaaaagacaactatgcctttgtgg

SEQ ID NO: 47 - DNA, 642 bp, synthetic construct
  source 1..642: mol_type = other DNA
atgaagctgctgattctgacctgcctcgttgcagtagccctcgctcgtcctaaacatccaataaaacaccaagggttgccccaggaggttctcaacgagaaccttcttcgtttttttgtagcccccttccctgaggtgttcggcaaagagaaggttaacgagctttcaaaggacattgggagcgaaagcacagaggaccaagctatggaggatataaaacaaatggaagccgagtccatctcatcaagtgaagagatcgttcccaacagcgtagaacaaaagcatatccaaaaggaggatgttccctcagagcgttaccttggttatcttgagcagcttctccgtctcaaaaagtacaaggtgcctcagctcgaaattgtgccaaattcagccgaggaaaggttgcactctatgaaagaaggaatacacgcacaacaaaaagagccaatgatcggcgtgaaccaggagcttgcatacttctatccagagctgtttcgccagttctatcaactcgacgcctatccctccggcgcttggtattatgtacctctgggcacacaatacacagatgcaccatctttttctgacattcccaatccaatcggatcagagaacagtgagaagaccacaatgcctctttgg

SEQ ID NO: 48 - DNA, 642 bp, synthetic construct
  source 1..642: mol_type = other DNA
atgaaactccttatcctcacttgccttgttgccgtcgccctcgcacgcccaaagcatcctataaaacatcaaggactgccacaggaagtgctgaatgagaaccttctgaggttcttcgttgcacccttccctgaggtcttcggtaaagagaaagtaaatgagctcagcaaggatataggctcagaatccaccgaagaccaggctatggaagacatcaagcaaatggaggcagaaagtatcagcagctctgaggagatagtccctaattcagtcgaacagaagcacattcaaaaggaggacgtacccagcgaaagatatttgggttatctcgaacagttgttgcgcttgaagaaatacaaggttccacagcttgagatcgtaccaaattccgcagaagagagactccactctatgaaggagggcatccatgcacaacagaaagaacctatgataggcgtgaatcaagagctggcctacttctatcctgaactctttcgccaattttaccagcttgacgcttatcccagcggagcatggtactacgtgcctctcggcacccaatatacagacgctccatctttctcagatattcccaatcctatcggttccgaaaattctgaaaaaacaacaatgccactctgg

SEQ ID NO: 49 - DNA, 642 bp, synthetic construct
  source 1..642: mol_type = other DNA
atgaaacttctcatcctgacctgtcttgttgccgtagccctggctcgtcctaaacatccaatcaaacaccaaggtctcccacaggaagtcttgaatgaaaatctgcttagattctttgttgctccctttcctgaggttttcgggaaagagaaggttaacgagctctcaaaagacattggctcagagtccacagaggatcaagctatggaagacattaagcagatggaggcagagtccattagtagttcagaagaaatcgtccccaacagtgtggaacagaaacacattcaaaaagaggatgtacccagcgaaaggtatctcggctacctggagcaattgctgagactcaaaaagtataaggtcccacagttggagattgttcccaattcagcagaggagagactccacagtatgaaagaaggcattcacgcccagcagaaagaaccaatgatcggagtcaatcaggaacttgcctacttctatcccgaactcttcagacaattttatcaactggacgcttatccaagtggcgcatggtactacgttcctcttgggacacagtacacagatgccccctcattcagcgacatacctaatcccatcggtagtgaaaatagtgagaaaaccaccatgccattgtgg

SEQ ID NO: 50 - DNA, 642 bp, synthetic construct
  source 1..642: mol_type = other DNA
atgaagttgcttatactgacttgcttggtagcagtagctctcgcaagacctaagcacccaataaagcatcagggcttgccccaagaagtccttaacgagaatttgctccgcttctttgtggcacccttccctgaagtatttggtaaggagaaggtgaacgaactgagtaaggacattggtagcgaatccaccgaggaccaagctatggaagatataaaacaaatggaagctgagtcaataagcagtagcgaggaaatagttcccaatagcgtggaacaaaagcacattcaaaaggaagacgtcccaagcgaaagatacctcggctacctcgaacaactcttgcgtttgaagaaatacaaagtgccacagttggagatcgtgcccaactctgctgaagagcgtcttcacagtatgaaagagggtatccacgcacaacaaaaagagccaatgataggcgtcaaccaagaactcgcatacttctatcccgaactcttcaggcagttctatcaactcgacgcctacccatctggcgcttggtattacgtccctcttggtacacagtacactgacgcccctagcttttccgatattcctaaccctatcggctccgaaaacagcgagaaaactactatgccattgtgg

SEQ ID NO: 51 - DNA, 642 bp, synthetic construct
  source 1..642: mol_type = other DNA
atgaaacttctcatactcacctgccttgtcgccgtggctctcgcccgtcctaagcaccctatcaagcatcaaggactgccacaggaggtactgaatgaaaatctcctgcgcttcttcgtggctccctttcccgaggtctttggcaaagagaaagtaaacgagctttcaaaagacatcgggagcgagagcactgaggaccaggctatggaggacatcaaacaaatggaggccgaatcaatcagctcttcagaggaaattgtgcccaactccgtggagcaaaagcatattcagaaggaagatgtcccttccgagagatatttgggttacttggaacaactccttagactgaaaaaatacaaagtgcctcaactcgaaattgtgccaaactccgccgaggaaagactgcactccatgaaagaggggatacatgcacaacaaaaggaacctatgataggggttaatcaggaactggcctatttttaccccgaacttttccgtcagttctatcaattggatgcctatccctcaggggcatggtattacgttccactcgggacccagtacactgatgccccatctttctctgacatccctaatccaattggcagcgagaacagtgaaaagacaacaatgccattgtgg

SEQ ID NO: 52 - DNA, 642 bp, synthetic construct
  source 1..642: mol_type = other DNA
atgaagcttctcatcttgacctgtttggtagcagtggccctcgcaagacctaagcatcccatcaaacaccaggggctcccccaggaggttctgaacgagaacttgcttagattctttgtggctcccttccctgaagtattcgggaaggaaaaggtgaatgagctttccaaagatatagggtccgaaagtacagaggatcaagctatggaagatataaagcagatggaggccgagtccatttcttctagtgaggagatcgttcctaatagtgttgagcagaagcacattcagaaggaagatgtgccttccgagagatacctgggttatcttgagcaacttttgcgcttgaagaagtacaaggtaccacagctcgaaatcgtacctaattccgccgaggaaaggctgcacagtatgaaggagggcatacacgcacaacaaaaagagccaatgataggggtgaatcaagagctcgcctatttctaccccgaactgtttcgccaattctaccaactcgatgcctacccaagcggcgcatggtattacgttccactcggcactcaatatactgatgctccatccttcagcgacatacctaatcctatagggagcgaaaactcagaaaaaacaactatgcctttgtgg

SEQ ID NO: 53 - DNA, 642 bp, synthetic construct
  source 1..642: mol_type = other DNA
atgaagctgctcatccttacttgtttggttgcagtcgccctcgctagacctaagcacccaattaaacatcaagggctcccacaagaggtgctgaatgaaaatttgctcagattctttgtggctccctttccagaggtatttggcaaggaaaaggtgaatgagttgagcaaggatataggaagcgagtctactgaagatcaagcaatggaagacatcaagcaaatggaagccgagtccatttccagtagtgaggaaatcgttcctaactccgtcgagcaaaaacatatccagaaagaagacgtgccatccgaaagataccttggatatttggaacagctgctgcgtttgaagaagtacaaagttcctcagctcgagattgtgcctaactctgcagaggaacgcctccactctatgaaagagggtattcacgcacaacagaaagaaccaatgattggtgtaaatcaagaacttgcctatttctatcccgaattgttcagacaattttatcagcttgacgcatatccatcaggtgcctggtactacgttcccctcgggacccaatacacagatgccccttctttctcagacataccaaaccctataggctctgaaaactccgagaaaactactatgcctctctgg

SEQ ID NO: 54 - DNA, 642 bp, synthetic construct
  source 1..642: mol_type = other DNA
atgaaacttcttatattgacatgcctggtcgctgtagcattggcacgtccaaagcatcccattaagcaccagggacttcctcaagaggtcttgaatgagaatcttcttcgtttcttcgtcgctccattccccgaggtgtttggaaaggagaaggtgaatgagttgtctaaagacattggctcagaatcaacagaagaccaagcaatggaagacataaagcagatggaggctgaatctatctctagcagtgaagaaattgtgcctaactctgtggaacaaaagcatatacaaaaggaggacgttcccagcgaacgttatctgggttatttggagcagttgctcaggttgaaaaagtacaaggtgcctcagcttgagatagtccctaattccgccgaggagaggttgcattctatgaaggaaggaatacatgcacaacagaaagagcccatgattggagtcaatcaagaacttgcatacttctaccccgaattgttcagacaattttatcagcttgatgcctacccctccggggcttggtattatgtccctttgggtacccaatataccgatgcaccaagttttagtgatatacccaaccctatcggtagcgagaacagtgaaaagacaaccatgcccctgtgg

SEQ ID NO: 55 - DNA, 642 bp, synthetic construct
  source 1..642: mol_type = other DNA
atgaagctgcttatcctgacctgtctcgtagctgttgcacttgccagaccaaaacatccaattaaacaccaagggctgccccaagaagtgttgaatgagaatttgttgcgctttttcgtcgcaccattccccgaggtctttggtaaggagaaagtgaatgaacttagtaaagacatcgggtctgaatctacagaggatcaggctatggaagatattaaacagatggaggccgagtccatttcctcctccgaggagatagtacctaattccgtagaacagaagcatattcaaaaggaagacgttccttccgagcgttacctgggctatctcgagcagcttttgaggctcaaaaaatacaaagttcctcagttggaaatcgtgccaaatagcgctgaagagcgtctgcatagcatgaaagagggaatccatgcacagcaaaaggagcccatgatcggcgtcaaccaggagcttgcttatttttatccagaattgtttaggcagttctatcagctggatgcctatccaagcggagcatggtattatgtaccattgggtacacagtacaccgacgcaccctccttcagtgatattcccaatccaattgggtctgaaaattcagagaaaactaccatgcccttgtgg

SEQ ID NO: 56 - DNA, 642 bp, synthetic construct
  source 1..642: mol_type = other DNA
atgaaactgcttatattgacctgtcttgtggcagttgcccttgctcgccctaagcaccctattaagcatcaaggccttccccaagaggtattgaatgagaaccttctcagattttttgtagctccatttcctgaagttttcggtaaggagaaggtcaacgaactgtcaaaagacatcgggagtgagtccactgaagaccaagctatggaggacataaagcagatggaggccgaaagcatctcctcaagtgaggagatagtccctaacagtgtagagcagaagcatatccagaaggaagatgtcccatcagagaggtatttggggtatcttgagcagctgctgaggttgaaaaaatataaggtgccccaacttgagattgttcccaactccgctgaagaaaggctgcactctatgaaggagggtatccacgcccaacaaaaagagcctatgataggagttaaccaagagcttgcttacttttatcccgaactgtttagacaattttatcagcttgacgcttatcctagcggagcctggtattatgtgcccctgggcacccaatatactgatgcacccagctttagtgacattcctaaccctataggaagtgaaaacagtgagaaaaccactatgccactttgg

SEQ ID NO: 57 - DNA, 642 bp, synthetic construct
  source 1..642: mol_type = other DNA
atgaagctcctcatactcacatgccttgtcgccgttgccctcgctcgtccaaagcatcctataaaacatcagggtttgccccaagaagtgttgaacgagaatttgcttaggtttttcgtagctccctttccagaggtatttggtaaagagaaggttaacgagttgagtaaggacattggtagcgaatccacagaagatcaagcaatggaagatattaagcaaatggaggccgagagcatctcatcctcagaagaaattgtacctaacagtgttgagcagaagcacatacaaaaggaagacgtcccctctgagcgttacctgggttacttggagcaactgctgagattgaaaaagtataaagttcctcagttggagatagtgcccaactcagccgaagaaagactgcactccatgaaagaaggcatccatgctcagcagaaagaaccaatgataggggttaaccaggaactggcctacttctaccccgagctcttcaggcaattctatcagctggatgcctatccttccggagcatggtattatgttccactgggtactcaatacacagatgcacccagtttctccgacatcccaaacccaatcgggtctgagaactcagaaaaaactactatgccattgtgg

SEQ ID NO: 58 - DNA, 642 bp, synthetic construct
  source 1..642: mol_type = other DNA
atgaaattgttgatattgacttgccttgtagccgtagccctcgcaagacctaagcatccaataaaacaccaaggactcccacaagaggtgttgaatgaaaacctcttgagattttttgttgccccattcccagaggtttttgggaaagagaaggtaaacgagctgtccaaagatattggtagtgagagcaccgaagaccaggctatggaagatataaagcaaatggaagctgaatcaataagtagttcagaggaaatcgtgcccaactcagtggagcaaaaacatattcaaaaagaagatgtccccagcgagcgttatctgggttatctcgaacagcttttgcgtcttaaaaagtacaaggttccccaactggagatcgtacctaattccgccgaagaaagattgcacagcatgaaggagggcatacacgctcagcaaaaagagcctatgatcggagtaaaccaggagctggcttatttttatccagaactcttcagacagttctaccaacttgatgcttatccatcaggtgcctggtattacgttcctctgggaacccaatatactgacgccccctcattctcagatatccccaatcccatcgggagtgaaaattcagagaaaacaacaatgcccctttgg

SEQ ID NO: 59 - DNA, 642 bp, synthetic construct
  source 1..642: mol_type = other DNA
atgaaactgttgatacttacttgcttggtggcagtggcattggctagacctaagcacccaatcaaacatcagggccttccacaagaggtacttaatgagaatctcttgcgttttttcgtagctccattccctgaagtcttcggcaaagagaaggtaaatgagctcagcaaagatatagggtccgagtctacagaagatcaagctatggaggacattaagcaaatggaagctgagtccatttctagcagcgaagagattgtacctaacagtgtagaacaaaaacatatccaaaaagaagacgttcccagcgagcgctatctcggttatttggagcagctcctgcgcctcaaaaaatacaaagtgcctcaacttgaaattgtacccaactctgccgaagagcgtctgcatagcatgaaggagggcatccatgctcaacagaaagaacccatgataggtgtaaatcaagagttggcctacttctatcccgaacttttcaggcaattctaccagctcgatgcctatcctagcggagcttggtattatgtgcccttgggtacacaatatactgacgcccctagtttttcagacattcctaaccccatagggtccgaaaactcagaaaaaacaacaatgcctctgtgg

SEQ ID NO: 60 - DNA, 642 bp, synthetic construct
  source 1..642: mol_type = other DNA
atgaagttgttgattcttacctgtcttgtcgctgtggccttggctaggcctaagcacccaataaagcaccaaggtctccctcaggaagtgcttaatgagaacctccttcgtttctttgtagcaccttttcccgaagtatttgggaaagagaaggtaaatgaactttccaaagatataggtagcgaatctacagaagaccaggctatggaggacatcaagcagatggaggccgagagtatctcatcatctgaagagatcgtcccaaattctgttgagcagaaacacatccagaaagaggacgtgccttcagagagatatctcgggtatttggagcaattgttgagactcaaaaaatacaaggttcctcagctcgagattgtaccaaactcagccgaagaaagacttcattctatgaaggagggcatacacgctcagcagaaggaacccatgataggagtaaaccaagaacttgcatatttctatcctgaactttttagacaattttatcagctcgacgcctacccttcaggtgcctggtactatgtcccattgggcacccagtacaccgatgctccatcttttagtgacatacccaacccaatagggtctgaaaactctgaaaagactactatgccactctgg

SEQ ID NO: 61 - DNA, 642 bp, synthetic construct
  source 1..642: mol_type = other DNA
atgaagctcttgatcctcacatgccttgtggccgtagctcttgctagacctaagcatcctattaagcaccagggcttgcctcaagaagtcttgaatgagaatctccttaggttttttgtcgcaccatttccagaggtattcggcaaagagaaagtgaacgagctgagtaaggacatagggtcagaaagtacagaggaccaagctatggaggacataaagcagatggaggccgaatctataagtagtagtgaagagatagtgcctaattctgtcgagcagaaacatattcagaaagaggatgtcccctcagagaggtacttggggtacttggaacaactcctgagactcaaaaaatacaaggttcctcagttggaaatagtgccaaactccgccgaggagagacttcattccatgaaagagggcatccatgcccaacagaaggagccaatgatcggagtaaaccaggagctggcctacttttaccccgaattgttcagacaattctaccaattggacgcatacccaagtggagcttggtattacgtccctctgggaacccagtatactgacgctccatcattctcagacattcccaatcccatcggcagcgaaaatagcgagaagactactatgcccttgtgg

SEQ ID NO: 62 - DNA, 642 bp, synthetic construct
  source 1..642: mol_type = other DNA
atgaaattgttgatactgacctgtctcgtggctgtagctctggccagacccaagcatcctatcaaacatcagggccttcctcaagaggtccttaatgaaaatttgctgagattctttgtagcacccttcccagaagtctttggtaaggagaaagtgaacgagttgagtaaagacataggcagcgagtcaactgaagatcaggccatggaggatataaaacaaatggaagctgagtcaatatccagtagcgaagagatcgtccctaactccgttgaacaaaaacacatccagaaggaagatgtaccaagcgaacgttacctcggttatcttgagcaactcctgagacttaaaaagtataaagtcccacaactggagatagtacccaattctgccgaggaacgcctgcatagcatgaaagaggggattcatgcacaacagaaagaacccatgataggtgtaaaccaggaacttgcctatttctaccccgaactgtttcgccagttctatcagcttgatgcatacccctcaggtgcctggtattacgtccctctcggtacacagtacactgatgccccttctttcagcgatattcctaatcctataggatctgagaactcagaaaagaccacaatgcctctttgg

SEQ ID NO: 63 - DNA, 642 bp, synthetic construct
  source 1..642: mol_type = other DNA
atgaagctgctgatactgacatgccttgtggctgtcgctcttgctcgtcctaagcatcctattaagcaccaggggttgccacaagaggtgcttaatgagaacttgctccgcttttttgtcgccccttttccagaagtgttcggcaaagagaaagttaacgaactttcaaaagatattggttcagaaagcaccgaagaccaggctatggaggacattaaacaaatggaggcagaatccatttcctcttccgaggaaatagtccctaactctgtagagcagaaacatatccaaaaggaagacgtgcccagcgaaagataccttggttaccttgagcaactcctgcgccttaaaaaatataaggttccccaactcgagatagttcctaatagtgcagaagagcgcctgcactcaatgaaagaggggattcatgcccaacagaaggaacctatgattggtgtaaatcaagagctcgcttacttttaccctgaattgtttcgccaattctaccaactggatgcttacccatctggtgcttggtactacgttcctctgggcactcaatacacagatgctcccagtttttctgacatacccaatcctatcggctcagagaatagcgaaaagaccactatgcctctctgg

SEQ ID NO: 64 - DNA, 642 bp, synthetic construct; identical to SEQ ID NO: 63
  source 1..642: mol_type = other DNA

SEQ ID NO: 65 - DNA, 642 bp, synthetic construct
  source 1..642: mol_type = other DNA
atgaaactgctcatacttacttgtcttgttgccgttgccctcgcacgtcctaagcatcccataaagcatcaaggattgcctcaggaggtcttgaacgagaatctgctgaggttctttgtggccccattcccagaagtgttcggaaaggagaaggtcaatgaactctctaaggacatcggtagcgaaagtacagaggatcaagccatggaagatattaaacagatggaggcagagtccatatccagctcagaggaaatagtccccaacagtgtcgagcaaaaacatattcagaaggaggatgtaccttccgagcgttacctgggttatcttgagcaacttctccgccttaagaaatataaggtgccacaactggagatagtacccaacagcgccgaagaaaggctgcactccatgaaggagggaattcacgcacaacaaaaggagcccatgataggggtaaatcaggaactggcatatttctaccccgagctttttagacaattctaccaactcgacgcatacccttcaggggcatggtattatgtgcctcttgggacccaatacacagacgcaccctctttctccgatattcccaatcctattggcagcgaaaactctgagaagacaacaatgccactgtgg

SEQ ID NO: 66 - DNA, 642 bp, synthetic construct
  source 1..642: mol_type = other DNA
atgaagcttctgattctcacatgtctcgttgcagtagcattggctagaccaaagcatcctataaagcaccagggccttcctcaggaggtattgaatgagaaccttcttcgttttttcgtcgctcctttccccgaagtttttggtaaggaaaaggtgaacgaactgtcaaaggacatcgggtccgagtccaccgaggatcaagcaatggaagacattaagcaaatggaggctgaatccatcagcagtagtgaagagattgtgccaaacagtgtagaacaaaaacatattcagaaggaggacgtaccatctgagcgttaccttggttacctggagcaacttctgagactgaagaagtataaagtaccccagctcgaaatcgttcctaattctgctgaagaaaggctccattccatgaaagaggggattcacgcccagcaaaaagaacccatgataggtgtaaaccaagaactggcatacttttaccccgaactgttccgtcagttctatcagttggacgcatatcctagtggagcctggtactatgtccctcttggaacccaatacactgacgcaccctcattcagtgacataccaaatcctatcggttctgaaaactcagaaaaaaccacaatgcctctgtgg

SEQ ID NO: 67 - DNA, 642 bp, synthetic construct
  source 1..642: mol_type = other DNA
atgaaattgttgatactcacctgtttggtcgccgtagccttggcccgccctaagcatccaattaagcatcaaggtttgccccaggaagtactgaatgagaatcttctccgttttttcgtagccccattccctgaggtctttgggaaggaaaaagtcaatgagctttctaaggatattggcagtgaaagcacagaggaccaagctatggaagatataaaacaaatggaggctgagtcaataagctcttcagaagagattgtacccaattctgttgagcaaaagcatatacaaaaggaagatgtgccttccgaaagatatctggggtatttggagcagctcttgcgtctcaaaaaatacaaggtccctcagcttgagatagtgccaaatagtgctgaggagagattgcactccatgaaggagggtatacacgcccaacagaaagaaccaatgataggcgtaaaccaggaacttgcatatttttaccctgagttgtttagacaattctatcagcttgacgcctaccctagcggcgcctggtattacgttcctctcgggacacagtacacagatgcacctagtttcagcgatattcctaaccctatcggttctgaaaacagcgagaagaccaccatgccactgtgg

SEQ ID NO: 68 - DNA, 642 bp, synthetic construct
  source 1..642: mol_type = other DNA
atgaaactgctgatcctgacttgtctggtggccgtggctctcgctaggccaaagcaccctatcaaacaccagggattgccacaagaggttcttaacgagaacctgctccgctttttcgtggcaccttttccagaggttttcgggaaggagaaggtaaacgagctgtccaaggatatagggtcagaatccaccgaagaccaggcaatggaggacataaagcaaatggaagccgaatctataagcagttccgaagagatcgtgcccaactccgtcgagcagaaacatatccagaaggaagacgtcccttctgagagatatttgggttatttggagcagctgctgagactcaagaagtacaaagtcccccagttggagatagttccaaattctgccgaagagcgtttgcactccatgaaagagggaatacatgctcagcagaaagagcccatgataggtgtgaatcaggagttggcctacttttatcccgaacttttcagacagttttaccaacttgacgcatatcccagtggtgcctggtattacgtgccactgggtacacaatacacagatgcaccatctttttccgatatacctaatcccataggctcagagaattcagagaagacaactatgccattgtgg

SEQ ID NO: 69 - DNA, 642 bp, synthetic construct
  source 1..642: mol_type = other DNA
atgaagttgctgatcctgacttgcttggtggctgtggcacttgccagacccaagcatccaatcaaacatcagggcttgccccaagaggtcctcaatgagaatcttcttcgtttctttgtagctccctttcctgaggttttcggaaaggagaaggttaatgagttgtcaaaggatattggatctgagtctacagaggatcaggctatggaggatattaaacaaatggaggccgaatctatctccagctcagaagagatcgttcctaacagtgtagaacagaagcacattcagaaagaagacgtcccaagcgaaagataccttggctatctggagcagttgctccgtcttaaaaaatacaaggtaccacaattggagattgtccccaactctgccgaagaaaggctgcacagcatgaaagagggaatccacgcccaacaaaaagagcccatgatcggcgtcaaccaggaacttgcatatttctatccagaattgttccgtcagttctaccagcttgacgcttatccttcaggcgcatggtactatgtacctctcggcactcaatatacagacgcaccaagtttctccgacatcccaaatccaattgggtctgagaacagcgagaaaacaacaatgcccctttgg

SEQ ID NO: 70 - DNA, 642 bp, synthetic construct
  source 1..642: mol_type = other DNA
atgaagctgcttatacttacatgtctcgtcgctgttgcactggcccgccccaagcacccaatcaaacaccagggattgcctcaagaagttttgaatgaaaatcttctccgcttctttgtcgccccatttccagaggtgttcggaaaggaaaaagtcaatgagctgtcaaaggatataggtagtgaatctacagaagaccaggctatggaagatattaaacaaatggaggcagaatctatatcctctagcgaagaaatcgtgccaaatagtgttgagcagaaacacatccagaaagaagatgtcccctcagaaagatacctggggtatcttgaacaacttcttagactcaagaaatataaagtgccacagcttgagatcgttcccaattctgctgaggaacgccttcacagcatgaaggaagggatccatgctcagcagaaagagcccatgattggcgtcaaccaggaactggcttatttctaccccgagcttttcaggcaattttaccaactggacgcctaccccagcggagcctggtattacgtgcccttgggaacacagtacactgatgccccctccttttccgacatacctaatcctataggtagtgagaattcagagaaaaccaccatgcctttgtgg

SEQ ID NO: 71 - DNA, 642 bp, synthetic construct
  source 1..642: mol_type = other DNA
atgaagttgctcattcttacttgcttggtagctgtggccttggcaagaccaaagcaccccattaaacaccaagggttgcctcaggaagtcctcaatgaaaacttgttgcgttttttcgtggctcctttcccagaagtttttggcaaagagaaggtaaacgaactctcaaaagacatagggagcgaatccaccgaagaccaggccatggaagatatcaagcaaatggaagccgaatctatatcttcctctgaggaaatagtccctaatagcgtcgagcaaaaacatatccaaaaagaagacgttccaagtgaaagatacttgggttatttggagcaactgctgcgtttgaagaaatataaagttccccagcttgagatagttccaaactcagccgaggaacgtctccacagcatgaaagagggaatccacgcccaacaaaaagaacctatgattggggtcaatcaggaactcgcatacttttaccccgaacttttccgtcagttttatcaattggacgcctatccaagtggggcctggtattatgtcccactgggaacccaatacactgatgccccatcattctcagatattcccaatcccatcggttctgaaaacagtgagaagaccaccatgcccctgtgg

SEQ ID NO: 72 - DNA, 642 bp, synthetic construct
  source 1..642: mol_type = other DNA
atgaaactgcttattttgacttgccttgttgctgtggcccttgctcgcccaaagcaccctatcaaacaccaaggtcttccacaagaagtcctgaatgagaatcttctccgtttctttgtcgccccatttcccgaggtgtttggtaaggagaaggtcaatgagctctctaaggacataggaagcgagagtacagaagatcaagcaatggaggatataaagcaaatggaggcagagtccatatcttctagcgaagaaattgtaccaaactctgtcgagcaaaagcacattcagaaggaggatgtaccatccgagaggtacttgggatatctggagcaattgctgagactgaaaaagtataaggtgccccagcttgaaatcgtccctaactctgcagaagaaagacttcatagtatgaaggaggggatacatgcccaacaaaaggaacccatgatcggtgtaaatcaggagctggcatacttctaccctgagttgtttagacaattttaccagttggacgcttatccaagtggggcctggtactatgtgcctctgggcactcagtacactgatgcacctagtttttctgacattcccaatcctataggaagtgaaaatagcgaaaaaaccactatgcccctctgg

SEQ ID NO: 73 - DNA, 642 bp, synthetic construct
  source 1..642: mol_type = other DNA
atgaagctgcttatattgacctgtctggtagctgtggcattggcaaggcccaagcacccaataaaacatcaaggtctgccacaagaggtcctgaatgaaaatttgttgaggttctttgtagcacctttccccgaggtttttggaaaagaaaaggtgaatgaactttctaaggatataggcagcgagtctactgaagaccaagcaatggaggatattaaacagatggaggctgagtccattagctcatccgaggaaatcgtacctaattcagtggagcaaaagcatatacaaaaggaggacgttccatcagagagatatttgggctatttggaacagctgttgcgcctcaagaaatacaaagtaccccaactggagattgttccaaactcagcagaggagcgtcttcattctatgaaggaagggattcacgcacaacagaaagagccaatgataggtgtgaatcaagaacttgcatacttttatcctgagctgtttaggcagttttatcagttggatgcttacccaagtggggcctggtattatgtgccccttggcacccaatacacagatgctccctctttttctgacattcctaaccccattggctcagagaatagtgaaaaaacaacaatgcctctgtgg

SEQ ID NO: 74 - DNA, 642 bp, synthetic construct
  source 1..642: mol_type = other DNA
atgaagctcctgatattgacttgtcttgttgccgtcgcccttgcacgtcccaaacaccccatcaagcaccaaggattgccccaggaagtattgaacgagaatcttctccgtttttttgtggcaccctttcctgaggttttcggaaaagaaaaagttaacgagcttagcaaagatataggttccgaaagcactgaggatcaggccatggaggacatcaaacagatggaagctgagtccataagcagttcagaggaaattgtacctaattcagttgaacagaaacacattcaaaaagaagatgtgccctctgagcgttatttgggatatctcgagcagctcctgcgtctgaagaaatacaaagtcccacagctggagattgtacctaactctgctgaagaaaggctccacagtatgaaggaaggcatccacgcacaacaaaaagagcccatgataggtgttaaccaggagcttgcttacttttatccagaattgtttcgtcagttttatcagttggacgcatacccctctggcgcttggtactacgttcctctgggaacccaatacacagacgccccaagttttagcgatattccaaatcccatcggttccgaaaactccgagaagaccacaatgcctctgtgg

SEQ ID NO: 75 - DNA, 642 bp, synthetic construct
  source 1..642: mol_type = other DNA
atgaaacttctgattcttacttgcttggtcgctgtggctttggcccgtcccaagcacccaataaagcatcaagggttgccacaggaagtcctcaacgaaaatctcctgaggttctttgtggcccctttccctgaggtgttcggcaaagaaaaggtgaacgaactgagcaaggacattggcagtgaatcaacagaagaccaagctatggaagatattaagcagatggaggcagaaagtatcagtagttcagaggagatcgtccctaatagtgtcgagcagaaacacatccagaaggaagatgttccaagcgagagataccttggttatcttgagcaacttctcagactgaaaaagtacaaagtacctcagctggaaatagtccccaactccgccgaagagaggcttcatagtatgaaagagggtattcacgctcaacaaaaagagccaatgatcggcgtgaatcaagaactcgcttatttttatccagagctgtttaggcaattctaccagcttgatgcatatccaagtggtgcctggtattatgtccctcttggaactcagtacactgatgcacccagtttttccgacatacccaaccccattgggtccgagaactcagagaagaccacaatgccattgtgg

SEQ ID NO: 76 - DNA, 642 bp, synthetic construct
  source 1..642: mol_type = other DNA
atgaagttgcttatactgacttgtctggtggctgtcgcccttgcacgtcccaaacatcccattaagcatcaaggcctcccacaggaagtgttgaacgaaaacttgttgcgcttttttgtggccccctttcctgaagtctttggcaaagagaaggtcaacgagctgagcaaagatatcggttccgagtcaacagaggaccaagctatggaggacatcaaacaaatggaagctgaaagtatttcaagttccgaagaaatagttccaaactccgtcgaacagaaacacattcagaaagaagacgtgccttctgaaagataccttggctacctggagcagctcttgagactcaagaagtataaggtcccccaacttgaaatcgtaccaaatagtgcagaagagcgcctgcatagtatgaaggagggcatccacgcccagcagaaagagcccatgattggcgtcaatcaagagctcgcctacttctacccagaactgtttaggcagttctaccagcttgacgcttatccatcaggcgcatggtactacgtgcccctgggtactcagtacaccgatgcaccctctttttctgatatacctaaccctattggatctgaaaatagtgagaagaccaccatgcctttgtgg

SEQ ID NO: 77 - DNA, 642 bp, synthetic construct
  source 1..642: mol_type = other DNA
atgaaactcttgattcttacctgcttggtggccgtagccctggcaaggccaaagcatcctattaagcatcagggactcccccaggaggtgctgaatgaaaacctcctccgttttttcgtggcccctttcccagaggtatttggcaaggagaaggtgaacgagctgagcaaggacattggttctgagagtactgaagaccaggctatggaggacatcaagcagatggaggcagagtctatttcctcatcagaagagatcgtcccaaacagcgtggagcagaagcatatacagaaagaagatgtgccttccgagcgctatcttgggtatcttgaacaactccttcgcctgaaaaaatataaagttccccaacttgagatagtccccaactccgcagaagagagactccacagtatgaaggagggtatccatgcccagcagaaggagccaatgattggggtgaatcaagagctggcatatttttatcctgaactgttcaggcaattctatcaacttgacgcttatccctccggcgcatggtactacgtacctctcggtacacagtacaccgatgcccctagtttttcagacattcctaatcctatcggctcagaaaattcagagaagacaacaatgcctctgtgg

SEQ ID NO: 78 - DNA, 642 bp, synthetic construct
  source 1..642: mol_type = other DNA
atgaaactgcttattctgacctgtttggtagctgtcgccttggcaaggcctaaacatccaatcaagcatcaagggctgcctcaagaagtcttgaacgagaatctgctccgttttttcgtagcaccttttccagaagtattcggaaaagaaaaagttaatgaactcagcaaagacatcggaagcgagagcaccgaagatcaggccatggaggacataaagcaaatggaagctgagtctatatctagcagtgaggaaattgtcccaaattctgtagaacagaagcatattcaaaaggaagacgttcccagtgagaggtacctggggtaccttgagcagttgttgcgcctgaaaaaatacaaggtacctcagttggaaatagtacccaatagtgctgaggagaggctgcattcaatgaaagagggcatacatgctcaacaaaaagagccaatgattggagtaaatcaggagttggcatacttctaccccgagctgtttagacaattctatcagctcgacgcatacccatcaggagcttggtactatgtgccacttggcactcagtacacagatgctccctccttctctgacattcctaatcctataggctctgagaactccgagaaaacaacaatgcccttgtgg

SEQ ID NO: 79 - DNA, 642 bp, synthetic construct
  source 1..642: mol_type = other DNA
atgaagctccttatattgacttgcttggtagcagtagcattggcaaggcctaagcacccaattaaacaccagggtctgcctcaggaggtcctcaacgaaaatcttctccgtttttttgtcgcaccctttcccgaggtcttcggaaaggagaaagttaatgaattgtccaaagacataggatctgagagcaccgaagaccaggctatggaggacattaagcaaatggaagcagagagtatatcatcttcagaggagatcgtacccaactccgttgagcaaaagcacatacagaaagaagatgtaccaagcgaaagatacctggggtatcttgaacagcttctgcgcctgaagaaatacaaggtcccccaactcgagatagtccctaactcagcagaggagaggctgcactcaatgaaagaaggtattcatgcccaacaaaaagagcctatgatcggggtcaatcaggagcttgcttacttttatcccgaacttttcaggcaattctaccagttggatgcttacccaagtggcgcatggtattatgttcccctggggacacaatataccgacgccccttccttttcagacatccctaatcctattgggagtgaaaattcagagaagaccactatgccactttgg

SEQ ID NO: 80 - DNA, 642 bp, synthetic construct
  source 1..642: mol_type = other DNA
atgaagctcctgatccttacctgccttgttgcagtagctctggctcgtccaaagcatccaattaagcaccaaggtcttccacaggaagttctgaacgaaaaccttctgcgtttcttcgtcgccccatttccagaagtgttcggaaaagagaaagtcaacgaactctctaaggatatcggctccgaatcaaccgaagaccaagcaatggaagacataaaacagatggaggctgagagcatttcctccagcgaggaaatcgtacctaactctgtcgaacaaaagcatatacaaaaagaagatgtacctagtgagcgctatctcggttacctggagcagttgcttagactgaagaagtataaagttcctcagttggagatcgtccccaatagtgctgaggaaaggttgcatagcatgaaggaaggcatccacgcccaacagaaggaacccatgatcggggttaatcaagagttggcttatttttatcctgagctgttcaggcagttctaccagcttgacgcatatccttccggtgcctggtactatgtcccccttgggacacagtacactgacgccccctcattcagcgacatccccaatcccattggttctgaaaatagtgaaaaaacaaccatgcccctgtgg

SEQ ID NO: 81 - DNA, 642 bp, synthetic construct
  source 1..642: mol_type = other DNA
atgaagttgctgatcttgacatgcctcgttgccgtcgcactggcacgtcccaagcaccccataaaacaccaggggctgcctcaggaggtacttaatgaaaacttgctgagattcttcgtggctccattccccgaagtatttgggaaagaaaaggtgaacgaactttctaaggacataggctctgagtcaaccgaagaccaggccatggaggacattaagcagatggaagctgaatcaatttcctcatctgaagaaatagtgccaaactctgtggaacagaagcatatccaaaaggaggacgtgccatcagaacgttatcttggatacctggaacaactcctgagactgaaaaaatataaggtgcctcaattggaaattgtccctaattccgctgaggaaaggctccatagcatgaaagaaggcattcacgcccaacaaaaagagcccatgatcggtgtaaatcaagaacttgcctacttttaccccgagttgttcagacaattttatcaactggacgcttacccctcaggagcatggtattacgtcccacttgggacacagtacactgatgccccttcttttagcgacattccaaatcctataggctccgagaatagcgaaaagaccactatgccactctgg

SEQ ID NO: 82 - DNA, 642 bp, synthetic construct
  source 1..642: mol_type = other DNA
atgaaactcttgattttgacctgcctcgttgccgtggcacttgccagaccaaaacatcccataaagcatcaggggttgcctcaggaagtcctgaatgaaaacttgctcagattctttgtcgctccatttcccgaagtatttggcaaggagaaggtgaacgaacttagcaaagacatagggtcagagtcaaccgaagatcaagcaatggaagacataaagcagatggaagccgaatcaatatcatcaagcgaagagatagtacctaactccgttgaacagaaacatatccaaaaggaggatgtaccaagcgagcgctatcttggatacctcgagcaactcctgcgtcttaaaaaatataaggtcccccagttggaaatagtaccaaatagcgctgaggagagacttcactccatgaaagaaggtatccatgctcagcagaaagaacctatgatcggtgtaaatcaagagctcgcatacttttatcccgagctctttagacaattttaccagttggacgcatatccttctggtgcctggtattatgtacctcttggtactcaatacaccgatgctccttcatttagcgacatacccaacccaatcggatcagaaaacagtgagaaaactactatgcccctctgg

SEQ ID NO: 83 - DNA, 642 bp, synthetic construct
  source 1..642: mol_type = other DNA
atgaagctgcttattttgacctgtttggttgctgtagctctcgcacgtccaaaacatccaatcaagcaccaggggctgcctcaagaggtattgaatgagaacttgctgcgcttttttgttgcccctttcccagaggtttttggtaaggagaaggtaaacgaactgtctaaagatattggttctgagagtacagaggaccaagcaatggaggacattaaacaaatggaagctgaatcaataagtagcagcgaggagatcgtgccaaactcagtggagcaaaaacatattcagaaggaggacgtaccatctgagagataccttggttacctggagcaactccttcgtttgaaaaaatacaaggtcccacagcttgaaattgtacccaattcagcagaggagcgtcttcatagtatgaaagagggtattcacgcccaacagaaggaacctatgatcggcgtcaatcaagaactcgcctatttctatcctgaattgtttcgccagttctatcaattggatgcttacccctccggcgcttggtattatgtcccccttggcacccaatatacagacgcacccagcttcagtgatataccaaatccaattggatctgagaattctgaaaagacaacaatgccactttgg

SEQ ID NO: 84 - DNA, 642 bp, synthetic construct
  source 1..642: mol_type = other DNA
atgaaacttttgatattgacctgtctcgttgccgtagctctggcacgcccaaagcaccccataaagcaccaagggcttccacaggaggttctcaatgagaatctgctccgcttttttgttgccccatttcctgaagtctttgggaaggagaaagtgaacgagctgtccaaagacatcgggagtgaaagcacagaagaccaagccatggaggacatcaaacagatggaagccgagtcaatcagtagttcagaggaaatcgtccccaattcagtagaacagaaacatatacaaaaagaggatgttccaagcgaaagatatttggggtacctcgaacagctcctgagacttaaaaagtataaggttccacagctcgagatagtacctaattcagccgaagaacgcttgcatagtatgaaagaagggatacatgcacagcaaaaggagccaatgataggagtgaaccaagagctggcttacttttatcctgagttgttcagacagttctaccagttggacgcctacccttccggtgcctggtactacgttccccttggtacccaatatacagatgctccatcatttagcgacattcccaaccccatcggctctgagaacagcgaaaaaacaaccatgcccttgtgg

SEQ ID NO: 85 - DNA, 642 bp, synthetic construct
  source 1..642: mol_type = other DNA
atgaagctgttgatactcacatgcttggtagccgttgcacttgctagaccaaaacatcccatcaaacaccaggggctgcctcaagaggttctgaatgaaaatctgctcaggttttttgtcgctccatttcccgaggttttcggaaaggagaaggtaaatgagttgtcaaaggatatcggatcagaaagtacagaggaccaggcaatggaagacattaagcagatggaggcagagagtatatcatcttctgaagaaatagtaccaaactccgtggagcagaagcatattcagaaagaagatgttccttctgagcgctacctcggctatttggagcaactcctccgtttgaaaaagtataaagttccacagctcgaaatagtgcctaattccgctgaagagcgtctccattctatgaaagaaggtattcatgctcagcagaaggaaccaatgattggtgtcaatcaggagctcgcttatttctatccagaactctttaggcagttttaccaacttgatgcatatccaagtggagcatggtattacgttccacttggtacacagtacaccgatgcaccctctttcagtgacattcccaaccctattggatcagaaaacagcgagaaaacaactatgcctctttgg

SEQ ID NO: 86 - DNA, 642 bp, synthetic construct
  source 1..642: mol_type = other DNA
atgaaattgctcatattgacttgcctcgtggctgtggctctggcacgtccaaaacaccccattaaacaccaaggactgcctcaagaagtgctcaacgaaaatttgcttcgcttcttcgtggcaccttttcctgaagtcttcgggaaagagaaagtaaacgagctctcaaaagacatcggaagcgaaagtacagaggatcaagctatggaggacataaaacaaatggaggctgagtcaatctcttcctcagaagaaatagtgcctaactctgttgaacaaaaacatattcagaaggaagatgtgccctctgaaagatatcttggatatctggaacaactccttagattgaaaaagtataaggtccctcaactcgaaatagtccccaattctgctgaagaaaggctgcattccatgaaggaaggcatccacgcccaacagaaggagcccatgataggtgtaaatcaagaattggcatacttttaccctgaattgttccgccaattttatcagctggatgcttatccatcaggtgcatggtactatgtccctcttggtacccaatacactgacgctccttcattctccgatatcccaaatcctataggaagcgaaaattctgaaaaaaccaccatgccactgtgg

SEQ ID NO: 87 - DNA, 642 bp, synthetic construct
  source 1..642: mol_type = other DNA
atgaagttgcttatactgacatgtctcgtcgccgtagcattggctcgtcctaagcaccccatcaaacaccagggacttcctcaggaggtattgaacgagaaccttctgaggtttttcgtcgctccttttcctgaggtttttggcaaggaaaaagtgaatgaacttagtaaggacattgggagtgagtccacagaagaccaagcaatggaagatataaaacaaatggaagcagagagcataagctcaagcgaagagattgtgcctaactcagtggagcaaaaacacatccagaaggaagacgtaccatccgagagatatctgggatacctcgaacagctccttcgcttgaaaaagtacaaggtgccacagctggagatcgtaccaaattcagccgaggaaagacttcatagcatgaaggagggtatccatgctcaacagaaggagcccatgatcggagtaaaccaagaactggcatacttttatcctgagttgttcaggcaattctaccagttggacgcttacccctctggagcatggtattatgtaccactggggacccaatacaccgacgcccctagtttcagcgacatacccaaccccattggcagcgaaaattctgaaaagactacaatgcctctgtgg

SEQ ID NO: 88 - DNA, 642 bp, synthetic construct
  source 1..642: mol_type = other DNA
atgaaactgctgatcctgacatgtttggttgcagttgcccttgccaggcctaaacatccaatcaagcatcagggcctcccacaagaagttcttaacgaaaatttgcttcgcttcttcgtggccccttttccagaggtatttggtaaagagaaggttaatgagctcagcaaagatattgggtcagaatctactgaagaccaagcaatggaggacatcaagcagatggaggctgagagcatatcctcatcagaggagatagtgccaaactcagtggagcagaaacatatacagaaagaggatgtcccatccgaaagataccttggctatcttgagcaacttttgaggcttaaaaaatataaggtgccacagttggaaatagtcccaaacagtgccgaagagcgccttcacagtatgaaggagggcatacacgcacaacaaaaagaacctatgattggagtgaatcaggaactcgcttatttttatcccgagttgtttcgccaattttatcagctcgacgcttacccaagtggggcatggtattatgtgccacttggcacacagtacactgacgctccatcttttagcgatattcctaatccaataggctcagaaaattccgaaaaaaccactatgcctctttgg

SEQ ID NO: 89 - skipped

SEQ ID NO: 90 - DNA, 642 bp, synthetic construct
  source 1..642: mol_type = other DNA
atgaaactcctcattcttacctgcctggtagccgtggcactcgcacgtcccaagcatcctataaagcatcaggggctcccacaagaagtgctgaatgaaaatttgcttaggttctttgttgcacccttccctgaggtatttggcaaggaaaaagtgaatgaattgagcaaagacatcggctccgaatccacagaagatcaagcaatggaagatattaaacaaatggaggcagaatctatttcttctagcgaggagatcgttcccaactccgtcgagcaaaaacatattcaaaaggaagacgtcccctctgagagatacttgggctacctcgaacagctcctcaggctcaaaaaatacaaagtgccacagctggagatcgttcctaactctgcagaagagaggttgcatagcatgaaagaaggaatccatgctcaacaaaaggagccaatgatcggcgttaatcaagaattggcttatttctatcctgagctcttcagacagttttatcaactcgacgcttacccaagcggtgcatggtactacgtcccccttggcacccaatatactgatgcccccagcttcagtgacatcccaaatcctatcgggtcagaaaattctgaaaagaccacaatgcccttgtgg

SEQ ID NO: 91 - DNA, 642 bp, synthetic construct
  source 1..642: mol_type = other DNA
atgaaactgctgatattgacatgtctcgttgccgttgcactcgcaagacctaaacaccctattaagcaccagggacttccacaagaagtgctgaacgaaaatctgctgcgctttttcgttgctcccttcccagaagtcttcggtaaagagaaagtaaatgagttgtctaaagatataggctctgaatctacagaagatcaggctatggaggatataaagcagatggaagctgaatccatctcctctagtgaagaaatagtccccaacagcgtagagcagaagcatatacagaaggaagatgttccttccgagcgctacctcggttaccttgagcaactcttgagactgaaaaaatacaaggtcccccaactggagattgtgcccaacagcgcagaggaaagattgcatagtatgaaggaaggtattcacgcccaacagaaggaacctatgatcggagtgaaccaggaactggcatatttctaccccgagctgttccgccaattttaccagcttgacgcttacccttcaggagcctggtactacgtacccttgggcacacaatatacagatgctccttcattcagtgatattcccaatccaatcgggtcagaaaactccgagaaaaccacaatgcctctgtgg

SEQ ID NO: 92 - DNA, 642 bp, synthetic construct
  source 1..642: mol_type = other DNA
atgaagttgctcattctgacttgtctggttgcagtagctctggcccgcccaaagcaccctatcaaacaccagggccttcctcaggaggtgctgaatgaaaacttgcttagattttttgtcgcccctttccctgaggtgttcggcaaggaaaaggtcaacgagctttccaaagacattggaagtgagtccacagaagatcaggctatggaggacattaaacaaatggaagctgaatcaatttcctcctctgaggaaattgtcccaaatagcgtggagcaaaagcacattcagaaggaggatgtcccatcagagagatatctgggttatctggaacaacttctgcgtttgaaaaaatataaggtacctcagctcgaaatcgtccccaatagcgccgaagaaagactccattctatgaaagagggtattcatgcacaacagaaggagccaatgataggagtaaaccaagaactcgcctacttctaccctgaattgtttaggcagttttatcagcttgatgcctatcccagtggtgcttggtattatgttcctctgggaacacaatacaccgatgcacctagtttctccgatattccaaatcccataggatccgagaattccgaaaagactacaatgccactctgg

SEQ ID NO: 93 - DNA, 642 bp, synthetic construct
  source 1..642: mol_type = other DNA
atgaaactgttgattttgacatgccttgtggcagttgcattggcacgtcccaaacatcccattaaacaccaaggactgccacaggaagttctgaacgagaacttgctccgcttctttgtggcacccttcccagaggtcttcggcaaggagaaagttaatgaactgtctaaagacattggttctgagtccaccgaagaccaggccatggaggacattaaacagatggaagccgaatctatctcaagtagtgaggaaatcgtgccaaactctgtagagcaaaagcatatccaaaaggaggatgttccctccgaacgttacctcggatacctcgaacaactgctgcgcttgaagaaatacaaagtgcctcaactggagatagtaccaaacagtgctgaggaacgcttgcactcaatgaaggaggggattcacgcccagcagaaggagcctatgatcggcgtgaatcaggaactcgcatatttctaccctgagctgttcagacagttctaccaacttgatgcttacccctcaggagcttggtattacgtgccactcggaactcaatatactgatgctccctcctttagcgacatccctaatcccataggttctgagaactctgaaaaaactactatgcctttgtgg

SEQ ID NO: 94 - DNA, 642 bp, synthetic construct
  source 1..642: mol_type = other DNA
atgaaactgctcatactgacttgcctggtagctgtcgccttggctagaccaaaacatccaataaagcatcagggtctccctcaggaggttcttaacgagaatttgttgagattctttgtggcacctttccctgaggtttttggaaaggaaaaggtgaatgaacttagcaaagatattggtagtgagagtaccgaggatcaggcaatggaggacataaaacagatggaggccgagagcatttcatcttctgaagagatagtccctaattcagtagagcaaaaacacatacaaaaagaggatgtgcctagcgagaggtatctcggctatttggaacagttgcttagactcaaaaagtataaagtaccacaactcgagattgtccctaattctgctgaagagcgtctgcattctatgaaggaaggaattcacgcccaacagaaggaaccaatgattggagtcaaccaggagctggcttacttttaccctgaattgtttagacagttctatcagctcgatgcttaccccagtggcgcttggtattacgtgccccttgggactcaatatactgatgctcccagtttctccgacatcccaaaccctataggctctgagaatagcgagaaaactaccatgcccctctgg

SEQ ID NO: 95 - DNA, 642 bp, synthetic construct
  source 1..642: mol_type = other DNA
atgaaactcctcatccttacctgtcttgtcgcagtcgcactggctagacccaagcaccctattaaacatcagggcctgcctcaggaggttttgaatgaaaatcttcttaggtttttcgtggcaccttttccagaggtttttggtaaagaaaaggtcaacgaacttagcaaagatattggcagcgaatcaactgaagaccaagctatggaggacattaagcaaatggaggcagagagcatttcctccagtgaggagatagttcctaattctgtggaacaaaaacatatccagaaggaagatgttcctagtgagcgttatttgggctaccttgagcaacttctgagattgaagaaatataaagtgccccaactcgagatcgtaccaaattcagctgaagaacgccttcatagcatgaaagagggtatccacgctcagcaaaaggaacccatgataggagtaaaccaggaactggcttatttttatcccgagttgttcagacaattttaccagctcgacgcctaccctagcggagcttggtactatgtgccccttggtactcaatacactgacgcacccagtttctcagacatacctaatccaattggaagcgaaaattccgaaaagacaaccatgcccctttgg

SEQ ID NO: 96 - DNA, 642 bp, synthetic construct
  source 1..642: mol_type = other DNA
atgaagttgctcattttgacctgccttgtcgccgtagcactggctagaccaaagcacccaatcaagcaccagggactcccccaggaggtcttgaacgaaaacttgctgcgtttcttcgtcgctcctttccctgaagttttcggaaaagaaaaagtgaatgaactctccaaggacatcggttcagaatcaacagaagaccaggcaatggaagatataaagcaaatggaggccgaatcaatatctagctctgaagagattgtccccaatagcgtggaacaaaaacatatacagaaggaagatgtgcctagtgaacgctatttggggtatcttgagcagttgctcaggctcaagaagtacaaggtgcctcagctcgaaattgtcccaaactccgccgaggaacgcctccattctatgaaggagggcatccacgcccaacaaaaagaacctatgatcggcgtgaatcaagaactcgcttatttctatcccgaattgtttcgccagttctatcaattggatgcctacccaagtggtgcatggtactacgttcctcttggaactcaatataccgatgcacctagcttctccgacatcccaaacccaatcggatcagagaatagcgagaaaaccacaatgcccctctgg

SEQ ID NO: 97 - DNA, 642 bp, synthetic construct
  source 1..642: mol_type = other DNA
atgaagctgcttatacttacttgtctcgttgcagtggcactggcaagacccaaacatccaattaaacatcaggggcttccacaggaagttttgaatgaaaatctcctgagattttttgtggctccctttcctgaggtattcggtaaagagaaggtgaatgaactttccaaagacattgggtccgaatctacagaggaccaagcaatggaggatataaaacagatggaagccgaatctatttcctcatctgaagagattgtgcctaactctgttgaacagaagcacattcagaaagaagacgtaccttctgaacgctatctcggatatctggagcaactgcttaggcttaagaaatacaaagtcccccagcttgaaatagttcccaactctgccgaagaaagacttcattcaatgaaggaaggcattcatgcccaacagaaggagcccatgattggggtcaaccaagagttggcctacttttatcccgaactgtttcgtcaattctaccagctggatgcttacccttccggggcctggtattacgtgccccttggaactcagtacaccgatgctccaagttttagtgacatacctaaccccataggaagcgagaacagtgaaaaaacaaccatgccactttgg

SEQ ID NO: 98 - DNA, 642 bp, synthetic construct
  source 1..642: mol_type = other DNA
atgaagctgctcatacttacttgtctggtggcagtcgcccttgcccgcccaaagcatcctataaagcatcaggggttgccacaggaagttttgaacgagaatcttcttcgcttcttcgtcgcacctttcccagaagttttcggtaaagaaaaagtcaatgaattgtctaaggatatcggctccgaaagtaccgaggaccaggccatggaggatataaagcagatggaggccgagtcaatatcctcttcagaagaaatagtgcccaactctgtcgaacaaaagcatattcaaaaagaggatgtccccagtgaaaggtacttgggatatctggaacagcttctgcgcttgaaaaaatataaggtcccccaactggagatcgtacctaactccgctgaggaacgcttgcactccatgaaagaaggcattcacgcacagcagaaggaaccaatgatcggggtgaatcaggagctcgcctatttctatcctgaactgttccgtcagttttatcaactggacgcctatccatcaggagcatggtactatgtcccactggggactcaatacactgacgccccctctttctccgatatacccaaccccattggtagcgaaaatagcgagaagaccacaatgcctttgtgg

SEQ ID NO: 99 - DNA, 642 bp, synthetic construct
  source 1..642: mol_type = other DNA
atgaagctgcttattctcacatgtcttgtggccgttgcactggctaggcccaaacatccaatcaaacatcaaggccttcctcaagaagtcttgaatgaaaatctgctgagatttttcgtagccccttttccagaagtatttgggaaggaaaaagtcaacgagctgtccaaagacatcggatcagaatctacagaagaccaggctatggaagatatcaagcaaatggaagcagaaagcatcagctccagcgaagagatagtcccaaattcagtggaacagaaacacatacaaaaagaagatgttcctagtgaaagatatttgggatatttggagcagctgctgagactgaagaaatacaaggtgccacagctggagatagtaccaaacagcgcagaggagcgtttgcacagcatgaaggagggtattcatgcccaacagaaagagcccatgataggagtaaatcaagagttggcctatttttatcctgagttgtttagacagttttatcaactggatgcctatccctctggtgcatggtattatgttcccctgggaactcagtacacagacgcaccttccttctctgatataccaaacccaataggttcagaaaactccgaaaaaactaccatgcccttgtgg

SEQ ID NO: 100 - DNA, 642 bp, synthetic construct
  source 1..642: mol_type = other DNA
atgaaactcttgatactcacctgtcttgtggctgtagcactggctcgccccaaacatccaatcaagcaccaggggcttccacaagaggtacttaatgaaaacctgcttcgcttttttgtggctccattcccagaggtatttgggaaggagaaggtaaatgaactgtccaaggacatcgggtctgagtccactgaagaccaggcaatggaagacatcaaacaaatggaagctgaatctataagtagttctgaagagattgtacctaattcagtagaacagaagcatatccagaaagaagacgttcccagtgaacgctacctgggatacctggaacaactcctcagattgaaaaagtacaaggttccccagctggaaatcgtacccaatagtgctgaggagagactccacagcatgaaggagggaatacatgctcaacagaaagagcctatgattggcgttaatcaggaacttgcctacttttaccctgaactgttcaggcaattttaccaattggacgcttacccctcaggagcatggtactacgtaccacttggcacacagtacactgatgccccttctttctctgacatcccaaatcccattggatctgaaaactccgagaagactacaatgcccttgtgg

SEQ ID NO: 101 - DNA, 642 bp, synthetic construct
  source 1..642: mol_type = other DNA
atgaaacttttgatcctcacctgtctcgtcgcagtagcattggctcgtcccaagcatcctataaagcatcagggactcccccaggaagtactgaacgaaaacctccttcgcttctttgtcgccccattcccagaagtctttggtaaggaaaaagttaatgaactcagtaaagacattgggagtgaaagcaccgaggaccaggccatggaagacatcaagcagatggaagccgagtctatatcatcatcagaagaaatagtccctaacagcgtcgaacaaaaacacatacagaaagaggacgtaccatccgaaaggtatcttggttacttggagcagttgctccgtttgaaaaaatataaggttccacaactggaaatcgttccaaacagtgcagaggaaaggctgcacagcatgaaagaaggcattcatgcacaacagaaagagcccatgataggagtgaaccaggaattggcctacttctatccagaacttttccgccaattttaccagctcgacgcctatccaagcggggcatggtattacgtgccattgggcacacagtacaccgatgccccttccttctctgatataccaaaccctatcggctctgaaaactccgaaaaaactacaatgccactgtgg

SEQ ID NO: 102 - DNA, 642 bp, synthetic construct
  source 1..642: mol_type = other DNA
atgaaacttctcatccttacatgccttgtagctgtggcactcgccaggccaaaacacccaatcaagcatcaagggctcccacaggaagtgttgaacgaaaatcttctgaggtttttcgtagctcctttcccagaggtgttcggaaaagaaaaggttaatgaactctctaaggacatagggagcgaatccaccgaagaccaagctatggaagacatcaaacagatggaagctgagtctatcagctctagcgaagagattgtgcctaactctgtggagcaaaaacacatacagaaggaagatgttccaagcgagagatatttgggttacttggagcaactccttcgcctgaagaagtacaaggttcctcagcttgagattgttcccaactccgccgaggagcgcttgcattctatgaaggagggaatacacgcacaacaaaaagaacctatgataggtgtcaatcaagagctggcctatttctatccagaacttttcagacagttctaccaactcgacgcttacccctcaggcgcttggtactatgtacccctgggcactcaatatacagatgcaccatcatttagcgacatcccaaaccctattgggtcagagaactctgaaaaaactaccatgcccctctgg

SEQ ID NO: 103 - DNA, 642 bp, synthetic construct
  source 1..642: mol_type = other DNA
atgaaattgttgatcctgacatgcctggttgctgttgctcttgcccgtcccaagcatcccatcaagcaccaaggactccctcaagaggtactcaatgagaacttgcttagattctttgtagctccttttcccgaggtcttcggtaaagaaaaagtcaacgagttgagtaaggatattggcagtgaatcaactgaagatcaagcaatggaggatataaaacaaatggaggccgaatccatcagttcctccgaagaaattgtccccaatagtgtagagcagaaacatatacagaaggaagacgttccaagcgagcgctacctgggttatctggagcaactcctccgcttgaaaaaatacaaggtcccccaactggagatcgtacctaatagcgccgaggagcgcttgcatagtatgaaagaaggaattcacgcacagcagaaggaacccatgattggggtcaaccaggaacttgcctacttttatcccgaacttttcaggcaattctatcagctcgatgcatacccttcaggagcatggtattatgtcccacttgggacccagtacaccgacgctcccagtttttctgacataccaaacccaatcggcagcgaaaattctgagaaaaccacaatgccactgtgg

SEQ ID NO: 104 - DNA, 642 bp, synthetic construct
  source 1..642: mol_type = other DNA
atgaagttgttgatcttgacatgtctcgttgcagtggcactggctaggccaaagcatccaataaagcaccaaggtctccctcaagaagtgctgaacgagaatcttttgcgtttctttgtggctccatttcctgaggtctttggcaaggaaaaagtcaacgaactttcaaaggatattgggtccgaatccacagaagaccaggctatggaggacatcaagcagatggaagccgagtccatatcatcaagtgaagagattgttccaaacagcgtggagcagaagcacatacagaaagaagacgtacctagcgagaggtatctcggctacctggaacaactcttgcgtcttaaaaagtacaaggtacctcaactggaaattgtccccaacagtgccgaagagcgtctgcattcaatgaaagagggcattcatgctcagcagaaagagccaatgattggtgttaatcaagagctggcttacttttatcccgagctgtttagacagttttaccaactggacgcctacccaagtggagcttggtattatgtacctcttggcactcaatacacagatgcaccatccttttcagacatccctaatcctataggctctgaaaactcagagaagacaacaatgcccctctgg

SEQ ID NO: 105 - DNA, 642 bp, synthetic construct
  source 1..642: mol_type = other DNA
atgaaactgcttatcctcacttgcctcgtagccgttgcacttgccaggcccaaacaccctattaagcatcaaggattgcctcaggaagtactcaatgagaacctgctcagattctttgtcgccccttttcccgaagtgttcggaaaagagaaagttaatgagctgagtaaagacattggatcagaaagcaccgaagatcaagccatggaagatattaagcagatggaagccgaaagtatcagttcttcagaggagatcgttccaaactcagttgaacaaaagcatatccaaaaggaggacgttccctctgaaagatacctcggttatctggagcaacttctcaggcttaaaaagtacaaagtgccccaactggaaattgtccctaatagcgccgaagagcgcctccactctatgaaggaaggaatccatgcccaacagaaggagcccatgatcggggtcaaccaagaactcgcttacttttacccagagttgttcaggcaattttaccaacttgacgcttacccaagcggcgcttggtattacgtacctcttggaactcagtacacagatgctccttcattttcagacatccccaatcctatagggagcgagaatagcgagaagactacaatgccactctgg

SEQ ID NO: 106 - DNA, 642 bp, synthetic construct
  source 1..642: mol_type = other DNA
atgaagttgttgattctcacctgtctggtagcagtcgccttggcacgccccaaacatcctattaaacaccaaggccttccccaagaggtgctcaatgagaatcttctcagatttttcgtggctccattccctgaagtctttgggaaagaaaaagtgaatgagctttccaaggatatagggagcgaatcaacagaagatcaggcaatggaggacataaagcagatggaagccgagagtataagcagctccgaggagattgtgcctaatagtgtggaacaaaaacatatacaaaaggaggatgtaccatccgaaaggtacttgggatacctcgaacagttgctgcgccttaaaaaatacaaggtaccccaactcgaaatagtgcctaactcagccgaggagcgtcttcattccatgaaggaggggattcacgcacaacagaaagagcccatgataggggtgaaccaagaacttgcctacttctatcctgaacttttccgtcagttctaccagctcgacgcttacccaagtggtgcctggtactatgtcccattgggcactcaatacactgatgctccatcattctcagacatacctaacccaatagggagcgaaaactctgagaaaacaaccatgcctttgtgg

SEQ ID NO: 107 - DNA, 642 bp, synthetic construct
  source 1..642: mol_type = other DNA
atgaagctgcttattttgacttgtctggtcgctgtcgcacttgctaggcctaaacaccctatcaagcaccaaggtctccctcaagaagttctcaacgagaatttgcttcgcttttttgtcgcacccttccctgaggtcttcggcaaagaaaaggttaatgagctgagcaaggacataggctctgaatctacagaagatcaggcaatggaagatataaagcagatggaggctgagtccataagcagttccgaggaaatcgtgcccaattccgtcgaacaaaaacacattcagaaggaagatgtccctagtgaacgctatctcggctatcttgagcagttgctgcgtttgaaaaaatataaagtacctcaattggagatcgtgccaaatagtgctgaggaaagacttcacagcatgaaagagggcatacacgctcagcagaaagaacctatgatcggggtaaaccaagagctggcttacttctaccctgaattgttccgtcagttttaccagctcgacgcttacccctctggcgcttggtactacgttccattgggtactcagtacaccgacgccccatcattctctgacatacctaatcctattggttccgaaaacagtgagaagaccacaatgcccctgtgg

SEQ ID NO: 108 - DNA, 642 bp, synthetic construct
  source 1..642: mol_type = other DNA
atgaaactcctgatcctcacttgcctggtggcagtggccctcgcccgccctaaacatcccatcaaacaccaagggcttcctcaggaagtccttaacgagaaccttctcaggttttttgtggctccatttccagaggtcttcggaaaagagaaagtaaatgaattgagcaaggacataggatcagaatccactgaagaccaagctatggaagacattaagcagatggaagctgaatccattagttcttctgaagagattgtcccaaattctgtcgagcaaaaacacatacagaaagaagatgttccatcagaaaggtacttgggctatttggagcagcttctccgtttgaagaagtataaagttccccaactcgagatagtaccaaactctgctgaagaaaggcttcatagtatgaaagaagggatacatgcccagcagaaagaaccaatgatcggtgtcaatcaggaattggcctacttctaccccgagttgtttaggcagttctaccaattggacgcatacccttcaggggcttggtactacgtgcctcttggcacccagtacacagacgcccctagttttagtgacattccaaaccctattggaagcgaaaatagcgagaaaacaaccatgcctctctgg

SEQ ID NO: 109 - DNA, 642 bp, synthetic construct
  source 1..642: mol_type = other DNA
atgaaacttctcatactgacctgtttggttgctgtggcacttgcccgccccaagcatcctataaaacaccagggtctgcctcaagaggttctcaacgaaaacttgttgcgtttcttcgtcgcaccatttcctgaggtatttggtaaggaaaaggtaaatgagctctctaaagacattgggagtgaaagtacagaagatcaagcaatggaagatattaagcagatggaagcagaaagtatcagtagttccgaggagatagtacctaattcagtggaacagaaacacattcaaaaagaggacgtaccaagtgagcgctatctcggttatttggagcaactgctcaggctgaagaagtataaagtgccccaactcgaaattgtgcctaactccgctgaggagagactgcattctatgaaagagggtatacacgctcagcagaaggagcccatgattggggtgaatcaagagcttgcttatttctaccctgagctgtttcgccagttctaccaactggatgcataccctagtggagcttggtattacgtcccactgggcactcaatataccgacgctccttccttttcagacattcctaatcccattggcagcgagaatagcgagaaaaccacaatgcccctttgg

SEQ ID NO: 110 - DNA, 642 bp, synthetic construct
  source 1..642: mol_type = other DNA
atgaaactcttgatactcacctgtttggtggctgttgcattggctcgtcctaagcaccccattaaacaccaaggtttgccccaagaagtattgaacgagaatctccttcgcttcttcgtggcccccttccccgaagtgtttgggaaggagaaagttaatgaactgtctaaggacataggtagtgaaagtacagaggaccaagcaatggaagacatcaagcaaatggaagccgagagcatttcatcttctgaggaaatcgtccccaattccgtagaacagaaacacatccaaaaggaagacgttcccagcgaaagatacctggggtatctcgaacagctcctcagactcaagaaatataaggttccacaattggaaatcgtacccaactccgctgaggagaggcttcattctatgaaagaaggcatacacgcccaacaaaaagaacctatgattggtgtaaaccaggaactcgcatatttctatcctgaactcttcaggcagttttaccagttggacgcttatccctcaggggcatggtactacgtaccattgggtacacagtacaccgacgcccccagtttctctgacatccctaatcccatcggctccgagaacagtgaaaaaactactatgcctttgtgg

SEQ ID NO: 111 - DNA, 642 bp, synthetic construct
  source 1..642: mol_type = other DNA
atgaaactgctcatcctgacctgcttggtggcagttgcccttgctcgcccaaaacacccaataaaacaccaggggcttccccaggaggtacttaatgagaatttgcttaggttctttgtagctcctttccctgaagtgtttggcaaggaaaaagtgaacgaactctcaaaagatataggtagcgagagtacagaagatcaagccatggaagacatcaaacaaatggaggcagagtcaatctcctcaagcgaggagatagtccctaactcagttgaacaaaaacacatccagaaggaggatgttcccagcgagaggtatctcggttatcttgagcaactgcttcgcctcaaaaaatacaaggtacctcaactcgaaatcgtgcccaatagcgccgaagagagattgcactcaatgaaggagggtattcacgcacagcagaaggaacccatgatcggcgtcaatcaagaactcgcatacttttacccagaattgtttaggcagttctaccagttggatgcatatcctagtggagcatggtattatgttcctcttggtactcagtacaccgatgcaccctcttttagtgacataccaaaccctattggctcagaaaactcagaaaaaactacaatgcccttgtgg

SEQ ID NO: 112 - DNA, 642 bp, synthetic construct
  source 1..642: mol_type = other DNA
atgaaactgctgattcttacctgcctggtcgccgtagctctggcacgccctaaacatcccattaagcatcagggtctgccccaggaagtattgaatgaaaaccttctccgtttcttcgtcgctccttttcctgaggtcttcggtaaagaaaaagtcaatgaactgtcaaaggatatcggatctgaatccactgaagatcaggctatggaggatattaagcagatggaagctgaatctatatctagtagtgaagaaatagtgcccaatagcgttgaacaaaagcacattcagaaagaggatgtcccaagtgaacgctatttgggatacctcgaacaacttctcagattgaaaaagtacaaagtacctcaactcgagatagtacccaatagtgccgaagaacgtcttcacagcatgaaggagggcattcatgcacagcaaaaggagcctatgatcggtgttaatcaagagttggcttacttttacccagaactgttcagacagttttaccagttggacgcttatcctagcggcgcctggtactatgttccacttggaacacaatatactgatgctccctctttttctgatattccaaatcccatcgggtctgagaactccgaaaaaactacaatgcccctttgg

SEQ ID NO: 113 - DNA, 642 bp, synthetic construct
  source 1..642: mol_type = other DNA
atgaaactccttatcttgacctgccttgttgcagtggcccttgctagacccaaacatccaattaaacatcagggccttccccaggaggtcttgaacgaaaatctcctcagattttttgtcgctccatttccagaagtattcgggaaagagaaggtgaacgaacttagtaaagacatcggtagtgagagcacagaggaccaggccatggaggacataaagcaaatggaggcagaatcaatatcaagctctgaggaaatagtacctaatagcgtcgaacagaagcacattcagaaagaggacgtaccttccgagcgctaccttggttatttggaacagctcctcagactcaaaaagtataaagtaccccagttggaaatagttcctaatagcgccgaggagcgtctgcattcaatgaaagagggcattcacgcacagcaaaaagaacctatgatcggcgtgaaccaggaattggcttacttttaccccgaattgttccgtcagttctaccagttggacgcttaccctagtggagcttggtactatgtacctcttggtactcaatacactgacgccccttcattctctgacattccaaaccccattggctcagaaaacagcgagaaaaccaccatgcctctctgg

SEQ ID NO: 114 - DNA, 642 bp, synthetic construct
  source 1..642: mol_type = other DNA
atgaagcttctcattcttacctgccttgtagcagtagcattggctaggccaaagcaccctattaaacatcaggggctgccccaggaggtccttaacgaaaatctgcttcgcttttttgttgctccctttcctgaagtctttggcaaggaaaaggtgaatgagttgtccaaggatatcggttctgaatctacagaggaccaggcaatggaggatatcaaacagatggaagctgagtcaattagttcatcagaagaaatagtgcctaactccgtagaacaaaaacacattcagaaagaagacgtaccctcagaacgctacctcggctacctggaacagcttttgcgtctgaaaaaatataaggttccacaacttgaaattgttcctaacagcgccgaagaaaggttgcacagcatgaaggagggaatacatgctcaacaaaaggaacctatgattggggtaaatcaggaattggcttatttctacccagagctttttcgccaattctatcagctggacgcatatccttccggtgcatggtactacgttcccctcggcacccagtacaccgatgcaccctcattctctgacattcctaaccctattggttctgaaaattcagaaaaaactactatgcccttgtgg

SEQ ID NO: 115 - DNA, 642 bp, synthetic construct
  source 1..642: mol_type = other DNA
atgaagttgcttatacttacttgcctggtagccgttgctttggcacgccccaaacatccaataaaacaccagggcttgccacaggaagtcctgaatgaaaatctcctgcgcttctttgtggctcccttccctgaggtatttggaaaagaaaaagttaatgagttgtcaaaggacataggtagtgagtccactgaggatcaagctatggaagatattaagcagatggaggccgagagtatctcttcaagcgaagagatagttcctaactccgtcgaacagaaacacatccaaaaggaagacgtaccatccgaaagatacctcggctatctcgaacagcttcttaggttgaaaaagtataaggttccccaacttgagattgttccaaacagcgcagaagagagactgcacagtatgaaggaaggaatccacgctcaacagaaagagccaatgatcggagttaatcaagagcttgcatatttctaccctgagttgtttcgccaattctatcagctcgatgcttatccttccggagcttggtattatgtgcctttgggtactcaatataccgacgcaccatcattttccgatatacctaaccctatcgggagtgagaacagtgaaaaaactaccatgcccctttgg

SEQ ID NO: 116 - DNA, 642 bp, synthetic construct
  source 1..642: mol_type = other DNA
atgaaactgctcatactcacctgcctcgtcgccgtagcactcgcaagaccaaagcatcccataaaacaccaagggctgccacaagaggttctgaatgagaatctgcttagatttttcgtcgcccccttcccagaagtgttcggaaaggaaaaagtaaacgagctttctaaagacatagggtctgaaagcacagaggaccaagcaatggaagacatcaaacagatggaggccgaaagcatcagctcctctgaggaaatagttcccaatagtgtggaacaaaaacatatccaaaaggaggacgttccatccgagagatatttggggtacttggaacagctgctcagactcaagaaatataaagtgccacaactggaaatcgttcccaactcagccgaggaaaggcttcatagcatgaaagaaggcattcacgcccagcagaaagagcccatgattggagtaaatcaagagttggcatacttctatccagaactcttccgtcaattctatcagctcgatgcttatccttctggtgcttggtattacgtccctctgggaacacagtatactgatgccccatctttttctgatataccaaatcctattgggtcagaaaatagcgagaaaaccactatgcctctttgg

SEQ ID NO: 117 - DNA, 642 bp, synthetic construct
  source 1..642: mol_type = other DNA
atgaaactcttgattctgacttgccttgtcgctgtcgcactggcacgcccaaaacaccctattaagcatcaaggtcttccacaggaagtattgaacgagaatttgctgagatttttcgttgccccctttcctgaagtgtttggaaaggagaaggtgaacgagcttagcaaagatattggatcagagtccacagaagaccaagctatggaggacattaagcaaatggaagccgagtctataagctcctcagaggaaattgtccccaattccgtagagcaaaaacacatacaaaaagaggatgtgccttccgagcgttatttgggttatctggaacaattgttgaggctgaagaaatacaaggttcctcagcttgagatcgtcccaaactccgccgaagagcgtttgcactctatgaaggaagggattcacgcacaacagaaggaacctatgatcggcgtaaaccaagaacttgcttacttttaccccgagctgtttcgccaattctaccagctggacgcctacccaagcggcgcatggtattatgtccctttggggactcaatatacagatgcaccctctttctccgacattcccaatccaatcggctctgagaatagcgagaaaactactatgcccttgtgg

SEQ ID NO: 118 - DNA, 642 bp, synthetic construct
  source 1..642: mol_type = other DNA
atgaaactcctgatccttacttgtcttgtagccgtcgctctcgcaaggcctaagcatccaattaaacaccaagggttgccacaggaggtacttaacgagaaccttctgcgttttttcgttgctccctttccagaggtatttggaaaggagaaggttaatgaattgtctaaagatattggaagtgagtccactgaggatcaggcaatggaggacatcaaacaaatggaagccgaatccatatcatcatctgaagaaatagtaccaaactctgtagaacaaaaacatatccaaaaagaggacgtacccagtgagcgctacctcgggtatcttgaacaactgcttcgcttgaagaaatacaaagtgccacagttggagatcgtgcccaacagtgccgaggagcgccttcactccatgaaggagggaatacatgctcagcaaaaggaaccaatgattggcgtaaaccaagagctggcatacttttaccccgaattgtttaggcagttctaccaactggacgcatatccatcaggggcatggtattatgtacctctcggtactcaatacacagacgccccttccttctctgatatacctaacccaatcggttcagaaaattctgaaaaaactaccatgcctctgtgg

SEQ ID NO: 119 - DNA, 642 bp, synthetic construct
  source 1..642: mol_type = other DNA
atgaagcttctgattcttacatgtcttgtcgccgttgctctggcccgccctaagcacccaattaaacatcaaggattgcctcaggaagtcctcaacgaaaacctcctcagattcttcgttgcaccattccctgaggtattcggtaaggaaaaagtaaatgaactctccaaagacatcgggagcgaaagtacagaagatcaggcaatggaagacatcaaacagatggaggccgagtccatttccagctctgaagagatagttcctaattctgtagaacagaaacatattcagaaggaagacgttccaagcgaaaggtatcttggctacctggaacaacttttgaggctgaaaaagtacaaggttccccaattggaaattgtgcccaacagcgccgaggagcgccttcactctatgaaggaagggatacatgctcagcagaaggagccaatgatcggcgtcaatcaggaattggcatacttctaccctgagctgtttcgccaattttatcaactggacgcttatccttcaggtgcctggtactacgtacctttgggtactcagtacacagacgcaccatctttttccgatataccaaaccccatcggatcagaaaattccgaaaagaccactatgccactgtgg

SEQ ID NO: 120 - DNA, 642 bp, synthetic construct
  source 1..642: mol_type = other DNA
atgaaactgcttattctcacttgccttgtggcagttgctctggctaggccaaaacaccctatcaagcaccaaggcttgccacaggaggttcttaatgagaacctcttgagattctttgttgccccattccctgaagtgtttggtaaagaaaaagtaaatgaactgagtaaggatatcggcagcgaaagcactgaagatcaagcaatggaggatataaagcagatggaggctgaaagcatttcttcttctgaagaaattgttccaaattctgtggagcaaaaacatatccagaaagaggatgtaccctcagagagatacctgggttatctggagcagttgttgaggctgaagaaatacaaagtgccccaacttgaaatcgtccctaacagtgctgaagagcgccttcatagcatgaaagaaggcatacatgctcagcagaaggagccaatgattggggtgaaccaggaactcgcttatttctatccagagttgttcaggcaattctatcaacttgacgcctatccaagtggtgcttggtactatgtaccattgggtacacagtacactgatgcacccagcttttcagacatacctaaccctataggcagtgaaaattcagaaaagacaaccatgccattgtgg

SEQ ID NO: 121 - DNA, 642 bp, synthetic construct
  source 1..642: mol_type = other DNA
atgaaactgctgattttgacatgcctcgtggctgtcgcattggctcgccccaagcaccctataaagcaccaaggcctcccccaggaagttctcaacgaaaatctgctgagattctttgtcgctccctttccagaagtcttcgggaaagaaaaagtaaacgaattgtctaaagacattggctccgagtccacagaggatcaagctatggaagacattaaacaaatggaagctgaatctattagtagctcagaggaaatagtgcctaacagtgtagagcaaaaacacatccaaaaagaagatgtgccctccgaaaggtaccttggttatcttgaacagttgcttcgcctgaagaaatataaagtacctcaactcgaaattgtacccaattccgccgaagaaagactccactcaatgaaagaggggattcatgcccagcaaaaggaacccatgattggcgtgaatcaagaactcgcctacttttaccctgaactctttcgtcaattttatcagttggatgcttaccccagtggggcatggtattatgtccctcttggtacacaatacaccgatgcaccatcatttagcgacataccaaatcctattgggagtgagaacagtgaaaaaacaacaatgcctctgtgg

SEQ ID NO: 122 - DNA, 642 bp, synthetic construct
  source 1..642: mol_type = other DNA
atgaaattgctcattcttacctgtttggtagcagtagcactcgccagaccaaaacaccctattaagcatcagggtctccctcaagaggtactgaatgaaaatctcctgaggttctttgtcgcacctttcccagaggtgttcgggaaggagaaagttaatgaactgagtaaagacatcggctctgagagtacagaggatcaggctatggaggacataaaacaaatggaggcagagtcaataagctcatctgaggagatagtacccaacagtgttgagcaaaaacacatacaaaaggaggatgtcccaagcgaaagatatttgggttacctggaacaattgctccgtctgaagaagtacaaggtccctcaacttgagattgtgcctaatagtgcagaggaaagacttcattccatgaaggagggtatccatgcacagcaaaaggagcccatgatcggagtgaatcaagagcttgcctacttttaccctgagcttttccgtcagttttatcaattggatgcctacccctctggagcctggtactacgtacctctcggaactcaatacacagatgctccctctttttcagatatacccaatcccattggatcagagaactctgaaaaaaccactatgccactttgg

SEQ ID NO: 123 - DNA, 642 bp, synthetic construct
  source 1..642: mol_type = other DNA
atgaagttgctcatattgacttgcctggtagcagtggctctcgcacgccctaaacaccctatcaaacaccagggtttgccacaagaggttctcaacgaaaaccttctgaggttctttgtggcacctttccctgaggtattcggcaaggagaaggtgaatgagctctctaaggacatcggcagcgagagcaccgaagaccaagcaatggaggacatcaaacaaatggaagccgaaagcatctccagctcagaagagatcgtcccaaatagcgtggagcaaaaacatatccaaaaagaagatgtcccaagcgaaagatacctgggctatttggaacagctcctgcgcctgaaaaaatataaagttccccaactcgaaatcgttcccaattctgccgaggaacgcctgcatagcatgaaggaaggcattcatgcccagcagaaggaacccatgattggcgtcaatcaagagcttgcatatttctatcccgagcttttcaggcagttctaccagctggacgcatacccttctggcgcatggtactatgtacctctcggaactcaatacaccgatgctccatcctttagcgacatccctaatcctatagggtccgagaactcagaaaaaactaccatgccactctgg

SEQ ID NO: 124 - DNA, 642 bp, synthetic construct
  source 1..642: mol_type = other DNA
atgaaactgctcatactgacttgcttggttgcagtcgctctggcacgtccaaaacatcctatcaagcatcagggtttgccccaggaagtgcttaatgagaaccttctgcgcttttttgtagcaccatttcctgaggtcttcgggaaggagaaagtcaatgagctgtccaaggacattggttcagaatccactgaagatcaggctatggaggacattaagcaaatggaagcagagagcataagtagttcagaagaaatcgtacctaattccgtcgagcaaaagcacattcagaaagaagacgtcccttcagaacgctacttgggatacctcgaacaactgttgcgtttgaagaagtacaaagtgccacaacttgaaatagttcctaacagtgctgaagagagacttcattccatgaaggagggaatacatgcacaacaaaaggagccaatgataggcgtgaatcaggaacttgcttatttttaccctgaacttttccgtcagttctatcaactggatgcttacccatccggtgcctggtattacgttccactcgggacacaatatacagatgctccaagcttttctgatatccctaacccaatcggaagcgaaaatagcgaaaagactactatgccactttgg

SEQ ID NO: 125 - DNA, 642 bp, synthetic construct
  source 1..642: mol_type = other DNA
atgaaattgctcatccttacctgtctggtagctgtggctctcgctcgcccaaaacacccaataaaacatcaaggtctgcctcaagaagtgttgaatgaaaatcttctccgcttctttgtggctccctttcccgaggtattcggaaaagaaaaagtgaatgagttgtcaaaagatattggtagcgaatctacagaagaccaagctatggaagatataaaacaaatggaggcagaatccatctcaagctccgaggagattgtacctaacagtgttgagcagaaacatatacagaaagaagacgtcccatccgagagatacttggggtacttggagcaactcctcagactgaaaaagtacaaggttccccaactggaaattgttcctaactcagccgaggagaggctgcactccatgaaagaggggatacacgcacagcagaaggagccaatgataggggtaaatcaggagctcgcatatttctaccctgagttgtttcgccaattttaccagctcgatgcttatccatctggtgcatggtattacgttcccttgggcactcaatacacagatgctcccagtttcagcgacattcctaatcctatcggttctgagaacagtgagaaaaccaccatgcccctctgg

SEQ ID NO: 126 - DNA, 642 bp, synthetic construct
  source 1..642: mol_type = other DNA
atgaaactccttatccttacctgcctggttgccgtagcactcgcaaggcccaagcatcccatcaaacaccaggggcttccacaagaggttcttaatgaaaatctgctcaggttctttgtagccccatttcctgaggtgttcggcaaagaaaaagtgaatgagctgagtaaagacattggtagcgaatctaccgaagatcaggctatggaggacataaagcaaatggaagcagagagtatttcaagtagtgaagaaatagttccaaactcagtagagcagaaacatatccaaaaagaagacgtacccagcgagcgttaccttgggtatctcgagcaacttctgagacttaaaaaatataaggttcctcaattggaaattgttcctaatagtgccgaagaaagattgcatagtatgaaagagggcatccatgctcaacagaaggagcccatgataggcgtgaaccaagagttggcatacttttaccccgaactgttccgccagttttatcagctcgacgcttacccaagcggagcatggtattacgtgccattggggactcagtacaccgacgcccctagctttagcgacatacctaatccaattggttccgaaaattctgaaaaaacaacaatgcctctctgg

SEQ ID NO: 127 - DNA, 642 bp, synthetic construct
  source 1..642: mol_type = other DNA
atgaaactccttatccttacatgcctggtggcagttgccctcgctaggcctaagcaccccatcaaacatcaggggttgccacaggaagttctcaatgagaatcttctccgctttttcgttgcccctttccctgaggtatttggtaaagagaaagttaatgaactgagcaaggacattggaagtgagtctaccgaggatcaagccatggaggatattaaacagatggaagctgaaagcatttcatcttctgaggaaatcgttcccaattccgttgaacagaagcacattcaaaaggaagatgtgccaagcgaaagatacctcggttatctggagcaactgttgcgcctcaaaaagtataaggtgccacaactggagattgtgcctaatagcgccgaggaaaggctccactctatgaaagaggggatacacgcacagcaaaaggaaccaatgatcggggtaaaccaagagctggcttacttctaccctgaacttttccgccagttttaccagttggacgcatacccaagtggggcttggtattatgtaccccttggtactcaatatactgacgccccttcattttctgacatcccaaatcccattggcagcgaaaatagcgaaaaaactacaatgcccctgtgg

SEQ ID NO: 128 - DNA, 642 bp, synthetic construct
  source 1..642: mol_type = other DNA
atgaaacttctgatactcacctgcctggtcgcagttgccttggcccgcccaaaacacccaattaagcatcaagggctgccacaagaagttcttaatgagaacttgttgaggtttttcgtggctccatttcctgaagtcttcggcaaagagaaagtcaacgaactttcaaaggacatagggagcgaatccaccgaggatcaagccatggaggatattaagcaaatggaggctgaatctattagcagcagtgaggaaatcgtaccaaactcagtagagcaaaaacacatacagaaagaggatgtgcccagtgaaagatatttgggataccttgaacaactgctcagactgaaaaaatataaggtgccccaactcgagatagttcctaacagcgccgaggaacgtctgcactcaatgaaagagggaatacacgcccaacagaaagaacccatgattggagttaaccaagagctggcttatttttatcctgaactgtttcgtcagttttaccaactcgacgcttacccttccggggcatggtattacgtcccattgggcacccaatacacagatgctccttcattttccgacatccccaatccaatcgggtccgagaactcagagaaaacaacaatgccactctgg

SEQ ID NO: 129 - DNA, 642 bp, synthetic construct
  source 1..642: mol_type = other DNA
atgaagctcttgatcctcacttgtcttgtagctgtggcccttgctcgccctaagcaccctataaagcaccaaggacttcctcaggaggtattgaatgagaacttgcttagattcttcgtggccccctttccagaagtgttcgggaaagaaaaagttaatgagctgagtaaggatattggatccgaatcaactgaggatcaggctatggaagacattaaacaaatggaagccgaatctatatcatctagcgaggaaatcgtacccaattccgttgagcagaaacacatccaaaaggaagatgtaccctctgagcgttatttgggatacctcgagcagcttctccgcttgaaaaaatacaaggtgccccagttggaaatagtccctaacagtgccgaagaacgcctccattctatgaaagaagggatacatgcacagcaaaaagaaccaatgataggcgtcaaccaggaactggcatacttctacccagagctgttcaggcaattttaccagttggatgcctacccttccggcgcatggtactatgtcccacttgggactcagtataccgatgcaccatcctttagtgatattcctaatcctattggctcagaaaactccgagaagaccacaatgccactgtgg

SEQ ID NO: 130 - DNA, 642 bp, synthetic construct
  source 1..642: mol_type = other DNA
atgaagctgctgatactcacatgccttgtggcagtagctctggctaggcccaaacatcctatcaaacatcaagggttgccccaggaagtacttaatgaaaatctccttagattctttgtcgcccctttccccgaagttttcggcaaggaaaaggtgaacgagctgagtaaagacattggtagcgagtcaactgaagaccaggccatggaggatattaaacaaatggaagctgagagcatctcctcttcagaagagatagtccctaacagcgtcgaacagaaacacatacagaaggaggatgtgccttcagaaagatacctcggttatctcgaacaactcttgagactcaaaaagtacaaggttccacaattggaaatagtacctaacagtgcagaggagaggcttcatagcatgaaagagggaatccacgcccaacagaaagaaccaatgattggtgtcaatcaagagcttgcctacttttatccagagctgtttaggcaattttatcagctcgacgcttaccctagcggcgcttggtactatgtccccttgggtactcaatacacagatgctccttctttctccgacatccccaaccccatcggctctgagaatagtgaaaaaactactatgcccctctgg

SEQ ID NO: 131 - DNA, 642 bp, synthetic construct
  source 1..642: mol_type = other DNA
atgaagctccttattctgacctgtcttgtagccgttgcactcgccagacctaagcaccccataaaacatcaggggctgccccaggaggttttgaatgagaacctccttcgtttcttcgtggccccttttcccgaagtcttcgggaaggaaaaggtcaatgaactctccaaggacattggtagcgagagcaccgaggaccaagcaatggaggacatcaagcaaatggaggcagaatccattagctctagcgaagagatagttcccaattctgttgagcagaaacacatacaaaaggaagacgtgcctagcgaacgctatttggggtatcttgaacagttgcttcgtctgaagaaatataaagtaccacaactggaaatagtaccaaacagcgcagaagaacgcctgcactctatgaaggagggtattcacgctcagcaaaaggagcccatgataggtgttaatcaggagctggcctatttctatcccgaattgttccgccagttctatcagctcgacgcatatccatccggagcatggtattacgtgccccttggaacccaatacaccgatgccccttcattttccgacattcctaatcctatcggctcagaaaactctgagaaaaccactatgccactgtgg

SEQ ID NO: 132 - DNA, 642 bp, synthetic construct
  source 1..642: mol_type = other DNA
atgaaactgctgatccttacttgtcttgttgccgtggccctggcacgccctaagcacccaataaaacatcaagggttgccacaggaggtcctgaacgagaatcttctgcgcttctttgtagcaccattccctgaggttttcggtaaagagaaggtaaacgaactctcaaaggacattggttccgagtcaacagaagatcaggccatggaggatatcaagcagatggaagctgagtccatatcctctagcgaagaaattgttccaaacagtgtggaacagaaacatatacaaaaggaagacgtgccttccgagaggtatctcgggtacttggaacagcttttgcgcttgaaaaagtataaggttccccaacttgaaattgtacctaattcagccgaagagcgcttgcatagtatgaaagaaggcattcacgctcagcagaaggaacctatgattggagtaaatcaggaacttgcatacttttatcctgagctgttcagacagttttatcaactggatgcatatccaagcggtgcctggtattacgtccctctcgggacccaatacactgacgcacctagttttagtgatatacccaacccaattgggtctgagaacagcgaaaagacaaccatgcctctttgg

SEQ ID NO: 133 - DNA, 642 bp, synthetic construct
  source 1..642: mol_type = other DNA
atgaaacttcttattcttacatgcttggtggccgttgcactcgctagacctaagcatcctataaagcaccagggtcttccacaagaggtattgaacgagaatctcctgagattttttgtcgctccatttccagaagtattcggcaaagaaaaagtgaacgagttgagtaaggatataggaagcgaatccacagaagatcaggctatggaagatataaagcaaatggaggctgaatccatctctagttccgaagaaatagtccccaatagcgtagagcagaagcacatacagaaagaggatgtgccctccgagagatacttgggctacctcgagcaactccttcgccttaaaaagtataaggtcccccaattggaaattgttcctaacagcgccgaggaaaggcttcattcaatgaaggagggcattcacgcacaacagaaggaacctatgattggggttaatcaggaactcgcttatttttatcctgagctgttcagacagttttatcaactggacgcctacccctccggggcatggtactacgtccccctgggcacccaatataccgacgcccctagtttttctgatattcccaatcctattgggtcagagaactcagaaaagacaactatgcctctttgg

SEQ ID NO: 134 - DNA, 642 bp, synthetic construct
  source 1..642: mol_type = other DNA
atgaaactcttgatacttacatgtcttgtcgctgtcgctttggctcgtcccaagcaccccatcaaacaccagggattgcctcaagaggttttgaacgagaacctgctgagatttttcgttgccccctttcctgaggtttttggcaaagagaaggtgaacgagctgtccaaagacattggttctgaatcaaccgaagatcaggctatggaagacataaaacagatggaggccgagtcaatatcttcctcagaagagattgttcccaactcagttgaacagaagcatatccaaaaggaggatgtgccttcagagcgctatctggggtatcttgagcaattgttgaggctcaagaagtataaggtgccccaacttgaaattgtaccaaactcagcagaggagagattgcactctatgaaggaaggtatccacgcccagcaaaaggaacccatgatcggtgtaaaccaggagctggcttatttctacccagaactgttcagacaattttaccaattggatgcctaccccagcggagcatggtattatgtgccacttggcacccagtatactgacgctccttctttcagtgacattcccaatccaattgggtccgaaaattctgagaagactaccatgcctttgtgg

SEQ ID NO: 135 - DNA, 642 bp, synthetic construct
  source 1..642: mol_type = other DNA
atgaaacttctcatcttgacctgtttggtggctgtcgctttggcccgtcctaagcatccaattaagcaccaaggtcttcctcaggaagtgcttaatgaaaatcttcttcgcttctttgtggctcctttccccgaagtcttcgggaaagaaaaagtaaatgaactgagcaaggacatcggttctgaatctactgaagaccaagccatggaggacattaagcagatggaggcagagtcaatatcttccagtgaagagatcgtacctaactctgtagaacaaaaacatatacaaaaggaagacgtgcctagtgaaaggtatctcggctatcttgaacaacttctcaggctcaaaaaatataaagtcccccaactggagattgtaccaaactcagcagaagaacgcttgcacagcatgaaagaagggattcatgcacagcagaaggagcctatgatcggcgtaaaccaggaactggcctatttttaccccgaactgtttagacagttttatcagctcgacgcctacccttcaggggcctggtattatgttccactggggactcaatacaccgacgcccctagtttcagcgacattcctaatccaatagggtccgagaactccgagaagacaacaatgcctctctgg

SEQ ID NO: 136 - DNA, 642 bp, synthetic construct
  source 1..642: mol_type = other DNA
atgaagctgcttatcctgacatgcctcgtagccgtcgcattggctcgcccaaaacatccaataaagcatcagggtctgccacaagaagttctgaatgaaaaccttctccgcttctttgtcgctccatttccagaagtgtttgggaaagaaaaagtcaatgaactctctaaagacataggttcagaatccacagaggaccaagccatggaagatataaaacagatggaggccgagagtattagttccagtgaagaaattgtaccaaattctgttgagcaaaaacatattcagaaagaggatgttccaagtgaaagataccttggctaccttgaacagttgctccgtctgaagaagtataaagtaccccagcttgaaattgtacctaattccgcagaggaaagacttcatagcatgaaagagggaattcacgctcagcaaaaagaacccatgataggcgtaaaccaggaactcgcatacttctatcccgaactttttaggcagttttaccagctggacgcatatccaagtggagcctggtattacgtgcctctggggacccaatatacagacgccccatccttctccgatattccaaacccaatcggtagcgaaaacagtgagaagacaaccatgcccctttgg

SEQ ID NO: 137 - DNA, 642 bp, synthetic construct
  source 1..642: mol_type = other DNA
atgaaactccttatactcacatgcttggtagccgtggcattggcacgcccaaagcatcctatcaaacaccagggactcccacaggaggtgcttaatgagaacctgttgaggttttttgtcgcaccatttcctgaggtgttcggtaaagagaaagtcaatgagttgagtaaggatattggatctgagagcaccgaggatcaggcaatggaagacattaagcagatggaagcagagagtatctcttcttcagaagagatcgtgcccaactcagtggaacaaaagcacatacaaaaagaggacgtccccagcgaaagatacttgggctatttggaacaattgctccgcctgaagaaatataaggtaccccaattggagatcgtacctaatagcgcagaggagagactgcattcaatgaaggaaggaatacacgctcaacagaaagagcctatgatcggcgtcaaccaggaactggcatacttctacccagaacttttcagacagttttaccagctcgatgcatacccctctggggcctggtactatgtgcccttgggtacccaatatacagacgcaccatcttttagtgacatccccaaccccattggcagcgaaaattctgaaaaaacaacaatgcccttgtgg

SEQ ID NO: 138 - DNA, 642 bp, synthetic construct
  source 1..642: mol_type = other DNA
atgaagctgctgatattgacttgtcttgtcgctgttgcccttgcaagacccaagcatcccattaagcaccagggcctcccccaggaagtgctgaacgaaaaccttttgcgttttttcgtggcaccattccccgaggtttttggaaaagaaaaggttaacgagctctccaaagacattggtagtgagagcaccgaggatcaggctatggaagacatcaaacagatggaagcagaatccatctccagtagcgaagaaatcgtgcccaatagtgtcgagcagaagcacatacagaaggaggatgttccttctgagcgttacctcggctaccttgagcagttgctccgtctgaaaaaatacaaggtaccccagttggaaatagtcccaaatagcgccgaggaaagattgcatagtatgaaggagggaatccacgctcagcaaaaggaaccaatgattggcgtcaaccaagaattggcatacttctaccctgagctttttaggcagttttatcaacttgacgcatacccttcaggagcatggtattacgttcccttggggactcagtatacagatgctccttccttcagtgacattcccaaccctatcggatcagaaaactcagaaaaaacaactatgcccctgtgg

SEQ ID NO: 139 - DNA, 642 bp, synthetic construct
  source 1..642: mol_type = other DNA
atgaaactgttgatcctcacctgcctggttgccgtcgcccttgccagacccaaacaccccattaagcatcagggattgccacaggaggtactgaatgagaacttgctcagattcttcgtcgcacctttcccagaggttttcggaaaggaaaaggtgaacgagctgagtaaagatattggatcagaaagtaccgaagaccaagctatggaagatataaagcaaatggaagcagagagcattagttcctccgaggagatcgtccctaacagtgtagagcagaaacatatacaaaaagaagatgttccatcagagaggtacttgggctatctggaacaattgctgaggctcaaaaaatataaagttccccagctggaaattgttccaaactccgccgaagaacgtcttcattctatgaaggaaggaatacacgcccaacaaaaggagcctatgattggtgtcaaccaagaactggcatacttttatcccgagctgttccgccaattctaccaactcgatgcatatccatctggagcctggtactacgttccacttggtacacagtatacagatgcaccatctttttccgatattcctaacccaattggctctgaaaatagcgagaaaaccactatgcctctttgg

SEQ ID NO: 140 - DNA, 642 bp, synthetic construct
  source 1..642: mol_type = other DNA
atgaagttgttgatccttacatgtttggttgctgtcgctctcgcaagaccaaagcaccccatcaagcaccaaggtcttccccaggaggtactcaacgaaaaccttttgcgcttctttgtcgccccttttcccgaggtatttggaaaagaaaaggtgaatgaactctcaaaggatattggttctgaaagcacagaagatcaggcaatggaagatattaagcaaatggaagccgaatcaatctcttcctctgaagagatcgtacctaacagtgtagagcaaaaacacattcaaaaagaagatgtgccaagtgagcgctatcttgggtatttggaacaactgctcaggctcaagaaatacaaggtgccacagctcgaaatagtcccaaacagtgctgaagagcgccttcacagcatgaaagagggtatacatgcacaacaaaaagagcctatgataggcgtaaatcaggagctggcctatttttacccagaattgtttagacagttttaccagctcgacgcctatccctccggtgcctggtactatgtacctctcggcacacaatataccgatgccccctcctttagcgacatccccaatcctataggctctgaaaattcagagaaaacaacaatgcccctctgg

SEQ ID NO: 141 - DNA, 642 bp, synthetic construct
  source 1..642: mol_type = other DNA
atgaagcttctcattctgacatgcctggttgccgtcgcccttgcccgccccaagcatccaatcaagcatcagggtctgccacaggaggttctgaacgaaaacctcttgaggttctttgttgctcctttcccagaagtgtttggaaaggagaaagtgaacgaactgtctaaagatatcggttccgagagcaccgaagatcaagctatggaagatataaaacaaatggaagcagagagtatatcatcttccgaagaaatcgtccccaactcagtggagcagaagcatatccaaaaagaagacgttccaagtgaaaggtacttgggctacctggagcaactcttgagattgaagaaatataaggtcccacaacttgaaatcgtgcccaactctgccgaggaacgcctgcactccatgaaagagggaattcatgctcagcaaaaggaacctatgattggtgtgaatcaagagcttgcatacttctacccagagctgttcagacagttctatcaactggacgcttacccatccggtgcttggtactatgttcccctcggcacacaatatacagatgccccttccttcagcgatattccaaatccaatcggtagtgagaattccgaaaaaaccaccatgcccctctgg

SEQ ID NO: 142 - DNA, 642 bp, synthetic construct
  source 1..642: mol_type = other DNA
atgaaacttctgattcttacatgcctggttgcagtcgccttggctcgccccaagcaccccattaagcaccaaggactcccccaggaggtcttgaatgaaaacctcttgaggttctttgtagctcccttcccagaagttttcggcaaggagaaggtaaatgaactgagcaaagacataggttcagagtctactgaggatcaagctatggaggatattaaacagatggaggctgaaagtataagttcttctgaggaaatcgtacccaacagcgtcgagcaaaaacacattcagaaagaggatgtcccctcagagaggtatctgggatacttggagcagcttctgcgtcttaaaaagtataaggtgccacaactcgaaatagttcctaattcagccgaagaaaggcttcacagcatgaaggagggcatacacgcacaacaaaaggaacctatgattggagtcaaccaggaactggcatacttctatcccgagctctttagacaattctaccagttggatgcttatccatccggcgcatggtattatgtacccctgggaacccagtacacagatgctcctagtttctcagacataccaaatcctattggctccgaaaacagcgaaaagactacaatgcctttgtgg

SEQ ID NO: 143 - DNA, 642 bp, synthetic construct
  source 1..642: mol_type = other DNA
atgaaattgcttattttgacttgtcttgtcgctgtagcattggcaaggcccaaacatccaattaagcatcagggattgcctcaagaggtattgaatgagaatctgcttcgtttctttgttgcacccttcccagaagtgtttggtaaagaaaaggtaaatgagctgagtaaagacattggctctgagtcaactgaagaccaggctatggaggacattaagcaaatggaagctgagtccatctctagctcagaggagatcgttcctaactcagtggagcaaaaacatatacagaaagaagacgtgcctagcgaaaggtatctcggatacttggaacaattgctccgtcttaaaaaatataaagtgccccaacttgaaattgtcccaaattctgccgaggaacgccttcacagcatgaaggaggggatacacgctcaacaaaaggagcctatgattggggtgaaccaagagctggcctatttttatcctgagctcttccgtcagttctatcagttggacgcatacccctccggagcttggtactacgtcccattggggactcaatacaccgacgcccccagtttttcagacattcccaaccctataggcagtgaaaactccgaaaaaacaacaatgccactgtgg

SEQ ID NO: 144 - DNA, 642 bp, synthetic construct
  source 1..642: mol_type = other DNA
atgaagctgcttattctcacttgcttggtggctgtagcactcgctcgccctaaacacccaataaaacaccaaggcttgccacaggaagtgctcaacgaaaatttgctgcgcttcttcgttgctccctttcctgaagtttttggcaaagaaaaagtcaacgagttgtctaaggatatcgggtctgaatccaccgaggaccaagcaatggaagacatcaaacagatggaagcagagtctatctctagctctgaagagattgttcccaactctgtggaacaaaaacacattcaaaaggaggacgtaccctcagaaagatacctcggatatcttgagcagttgcttcgtttgaagaagtataaagtcccacagcttgaaatcgtccctaactctgccgaagaacgtctccattccatgaaggagggtattcacgcacaacaaaaggagcctatgattggcgtgaaccaagaactggcttatttttatccagaactttttcgtcagttctaccaactcgatgcttatccttccggcgcttggtactacgtacctcttggaactcagtatacagatgcaccttcattctccgacatacccaatcccataggttctgagaacagtgaaaaaacaacaatgccactctgg

SEQ ID NO: 145 - DNA, 642 bp, synthetic construct
  source 1..642: mol_type = other DNA
atgaagctcttgattcttacatgccttgttgccgtagcattggcacgtcctaaacacccaataaagcaccagggactccctcaggaggtgctgaacgaaaatctgctgagattctttgtcgccccctttccagaagtattcggtaaggaaaaagtcaatgaattgtcaaaggacatcggttctgagagcacagaagatcaggctatggaggacatcaagcaaatggaagccgaatctatttctagttccgaagagattgtacctaactccgtcgaacaaaagcacattcagaaagaagatgttcctagtgaacgctatcttggctatcttgaacaactgttgagattgaagaaatacaaagtgccacaacttgaaatcgttccaaactccgcagaagagcgcctgcactctatgaaagaaggaattcacgcccaacaaaaggagcccatgataggagtaaaccaggagctggcatatttttatcccgagctgttcaggcaattctatcaacttgatgcctacccatctggggcatggtactatgttccactcggcactcaatataccgatgctccaagtttctcagatatccctaatcccataggtagtgagaatagcgaaaagaccaccatgcctctctgg

SEQ ID NO: 146 - DNA, 642 bp, synthetic construct
  source 1..642: mol_type = other DNA
atgaagcttcttatcctcacctgtcttgttgcagttgccctggcacgcccaaaacatcccatcaagcaccaagggcttccacaagaagttcttaatgagaatctgcttcgctttttcgttgccccatttccagaggtattcggtaaagagaaagtgaatgagcttagtaaagacattggttcagagtcaaccgaagatcaggcaatggaagacattaagcaaatggaggctgaatcaatttcatcttccgaggaaatcgtacccaattctgtggagcaaaagcacatccaaaaggaggacgtgccttccgagcgttacttgggataccttgagcagctcctgagacttaagaaatacaaggtgccacagctcgaaattgtacccaattccgcagaggagcgtctccattccatgaaagagggaatacatgctcagcagaaggaacccatgatcggcgtcaatcaagagttggcctatttctacccagagttgttccgccaattttatcaactcgatgcctatcctagtggtgcctggtactatgtacccctcggaacacaatatacagacgcaccctcctttagtgacatacccaatcccattgggagcgagaactcagagaaaaccacaatgccactgtgg

SEQ ID NO: 147 - DNA, 642 bp, synthetic construct
  source 1..642: mol_type = other DNA
atgaaactgctgattctcacatgtttggtcgctgtggcattggcccgtcccaagcatcccataaaacatcaggggttgcctcaagaggtacttaacgagaacctgttgcgtttctttgttgctcctttccccgaggtgtttggaaaggaaaaggtcaacgagttgtctaaagatatagggtccgaatcaacagaagaccaggctatggaagacataaaacaaatggaggccgaaagcatctcatctagcgaagagatcgtccccaatagcgtggaacaaaagcacatacagaaagaagatgtcccctccgaacgttatctcggctatctcgaacagttgttgcgtttgaagaagtacaaagtaccccagctcgagatcgtacccaacagtgccgaggagcgcctgcattccatgaaagaagggatacacgcacagcagaaggagccaatgatcggggttaaccaagagctggcctatttttatcccgagttgttcagacaattctatcaactggacgcataccccagcggtgcatggtattatgtacctctcggaacccagtacacagatgcaccatcattcagcgatataccaaaccccatcggttccgaaaatagcgaaaagactactatgccactgtgg

SEQ ID NO: 148 - DNA, 642 bp, synthetic construct
  source 1..642: mol_type = other DNA
atgaaactccttatacttacctgccttgtagccgtcgcactcgccaggccaaagcaccccatcaaacaccaagggctgccacaagaagtcctcaacgagaatcttctcagattcttcgtggcaccattccccgaagtcttcggcaaagaaaaggtcaacgaacttagtaaggatattgggagcgaaagcaccgaagaccaagctatggaagatataaaacagatggaggcagagtcaatcagcagctccgaggaaatagtacctaattccgtggagcagaaacacattcagaaggaggatgtgccctctgagcgctatcttggatatttggaacaactgctccgcctgaaaaagtataaggtaccccagctggagatcgtgcccaattcagctgaagaaagactgcatagtatgaaagaaggcatacatgcccaacaaaaagagcccatgattggcgtaaatcaagagctggcttatttttatcctgaactgtttcgccaattctaccagcttgatgcttatccatctggcgcttggtattacgtgcccctcggaacacaatacaccgatgctcccagcttcagcgatataccaaacccaattgggtctgaaaattcagagaaaaccactatgcccctctgg

SEQ ID NO: 149 - DNA, 642 bp, synthetic construct
  source 1..642: mol_type = other DNA
atgaaacttttgattctcacatgccttgttgcagtggcacttgccaggcccaagcatccaattaagcaccagggcctgccacaggaagtacttaacgagaaccttttgcgcttctttgtagctcccttcccagaggtatttggcaaagagaaggtgaacgaacttagtaaggatataggttctgagtccacagaagaccaggcaatggaagatataaaacaaatggaagcagaatccatatcctctagcgaagagatagtcccaaactcagtggagcaaaaacacatccaaaaagaagacgttccctcagaaagatatttgggctacctggaacaactgcttcgccttaaaaagtacaaggttcctcagctggaaatagtaccaaattctgccgaggagcgcctccacagtatgaaggaaggtattcacgctcaacaaaaagagcccatgatcggtgtcaatcaggaattggcatatttttaccccgaactcttcaggcaattttatcaattggatgcctacccctctggtgcatggtactatgtacccctcggcactcaatacactgacgcaccttcattcagtgacatccctaatccaataggcagtgaaaatagcgagaagactacaatgcccctctgg

SEQ ID NO: 150 - DNA, 642 bp, synthetic construct
  source 1..642: mol_type = other DNA
atgaaactgttgatactgacatgtttggtggctgtcgctcttgcccgtccaaagcatcctattaaacatcagggcttgccccaggaggtactgaatgaaaacctcctgcgtttcttcgtggctcccttccccgaagtattcggcaaggagaaagtcaatgagctgagcaaagatataggttctgagtccacagaggaccaagcaatggaagacataaagcagatggaggccgaatccatatcctctagtgaggaaattgttccaaacagcgtagaacaaaaacatatccaaaaggaagatgtcccatcagagcgctacttgggttacttggaacagctcctgcgccttaaaaaatataaagtacctcagctcgaaatcgtaccaaacagtgctgaagagaggcttcacagtatgaaagaaggcatccacgcacagcaaaaagaacccatgatcggcgttaaccaagaactggcatacttttaccccgagctttttcgtcagttttaccagttggacgcatacccctcaggtgcttggtattacgtccccctcggaacacaatacactgacgctccttcattttccgacatacccaatcctattgggtccgagaacagtgaaaagactactatgcccctctgg

SEQ ID NO: 151 - DNA, 642 bp, synthetic construct
  source 1..642: mol_type = other DNA
atgaaacttctgatcctgacttgtctcgttgctgtagcactggcaagacctaagcatcctatcaaacatcagggactgcctcaagaggtcctgaacgagaacctgctgaggttctttgtagcaccctttcctgaggtgtttggtaaggagaaagtcaacgaactgtccaaagatataggcagtgaatctaccgaagatcaagcaatggaggacatcaaacaaatggaagcagaatcaatatccagcagcgaagagattgtgccaaactcagtggaacagaaacatattcagaaggaggatgttccctcagagcgctatctgggttatttggagcagctccttagactcaagaagtataaggtcccccagctcgaaatcgtacccaactccgccgaagaacgcctccacagtatgaaggagggtatacatgcacaacagaaagaaccaatgataggcgtaaaccaggaacttgcatatttttatcccgagctgttcaggcaattctatcagcttgacgcctatccaagtggcgcttggtattacgtgcctcttggcacccagtatactgatgcacctagcttcagtgatattccaaaccccatcggctctgaaaactctgagaaaactactatgcctttgtgg

SEQ ID NO: 152 - DNA, 642 bp, synthetic construct
  source 1..642: mol_type = other DNA
atgaaactgctcatacttacttgcttggtagcagtagcacttgctaggccaaagcacccaatcaagcaccaggggctcccacaagaagtgcttaatgagaatctcctgcgtttctttgtagccccattccccgaagtctttggtaaagaaaaagtgaacgagctttccaaggatataggaagcgagagtaccgaggatcaagcaatggaagacattaaacagatggaggcagagtcaatttcaagcagtgaggaaatagtccctaactctgtcgaacagaagcacatacagaaagaagatgtccccagcgaacgttacttgggatatcttgagcaactgctccgcctgaagaaatataaagtgcctcagttggagatcgtgccaaacagtgctgaggagagactccattctatgaaggaaggtatccatgcacaacaaaaggaaccaatgatcggagtcaatcaggagttggcatatttttaccccgaattgtttagacaattctatcaactcgacgcatatccttctggagcctggtattatgtgcctctgggaacccaatacacagatgctccctcctttagcgacatccccaatcccataggtagcgagaatagcgagaagaccaccatgccactttgg

SEQ ID NO: 153 - DNA, 642 bp, synthetic construct
  source 1..642: mol_type = other DNA
atgaaactgttgatattgacttgcctggttgcagtcgccctcgcacgtcctaaacacccaatcaaacatcaaggtctcccacaggaggttcttaatgaaaatttgcttaggttttttgtcgccccctttcccgaagtctttgggaaagaaaaggtcaacgaactgtcaaaagatattggaagcgaatcaaccgaagatcaagccatggaagatattaaacaaatggaggctgaaagcatctcaagttctgaagagatcgtccccaattctgtcgagcaaaagcacatacaaaaagaggatgtgccaagtgaaagataccttggctaccttgaacaattgttgcgcttgaagaagtacaaagtcccacaacttgagatcgttccaaatagcgctgaggagcgcttgcactctatgaaggagggcatacatgctcaacagaaggagcctatgataggagtcaatcaggagcttgcatacttctacccagaactcttcaggcaattctatcaacttgatgcttatcccagtggtgcttggtattatgtcccacttggtactcaatacactgatgccccaagcttttctgatataccaaatcccattggctccgaaaattcagagaaaactactatgcccctctgg

SEQ ID NO: 154 - DNA, 642 bp, synthetic construct
  source 1..642: mol_type = other DNA
atgaagctccttatccttacctgtctggtcgcagtagcactcgcaagacctaaacaccccatcaagcatcaggggctcccacaggaggtgttgaacgagaatctgttgcgttttttcgtcgcacctttcccagaggttttcgggaaagaaaaagtgaacgagttgtccaaagacattgggtccgaaagtacagaagaccaagctatggaagacataaagcaaatggaggccgagtctataagtagcagcgaagagattgttcccaactcagtcgagcaaaaacatatccaaaaggaagatgttccatctgagcgttacttgggttacctggagcagctcttgagactcaagaagtacaaggtgcctcagttggaaatagtccctaatagtgctgaggagcgcctccatagtatgaaagaagggatacatgcccaacagaaggagcccatgattggagtgaatcaggagctggcatatttctatcctgaactgttcaggcaattctaccagctggacgcatacccaagtggagcatggtattacgtcccactgggcactcaatatactgacgctccttcttttagcgacatccctaatcctataggttcagagaattctgagaaaaccaccatgcctctctgg

SEQ ID NO: 155 - DNA, 642 bp, synthetic construct
  source 1..642: mol_type = other DNA
atgaagctcctcattttgacatgtctcgtagccgtggcactcgccagacctaaacaccctatcaagcaccaaggccttcctcaagaggttctcaacgagaatctcctgaggttcttcgttgcccctttccctgaggtgtttgggaaggaaaaagttaacgaattgtctaaagatatagggtctgaatccacagaagatcaagcaatggaggacatcaagcaaatggaggccgaaagtatctcttcaagcgaggaaatcgtacccaacagtgttgaacaaaaacatatccaaaaggaggacgtaccaagcgaacgttatcttggttacctggaacaactcttgcgcctcaagaaatataaagtgccccagttggagatcgttccaaattctgctgaggagagactccattccatgaaggagggtatccatgcccaacagaaagagcccatgattggcgtcaaccaagaactcgcatatttttatccagaactcttccgtcaattttaccaacttgacgcctatccatctggcgcttggtactacgtcccacttgggacacaatataccgacgccccctctttcagtgacatccccaatccaatcggtagtgaaaattcagagaagactactatgccactctgg

SEQ ID NO: 156 - DNA, 642 bp, synthetic construct
  source 1..642: mol_type = other DNA
atgaagttgctgatcctcacttgcctcgtagcagttgccctcgctcgcccaaagcaccctataaaacaccagggtcttcctcaggaagtattgaatgaaaatcttttgcgctttttcgtcgcccccttccctgaagtcttcggtaaagaaaaagtaaacgagctttccaaagacatcggttccgagagtaccgaagaccaggcaatggaggatattaagcaaatggaagcagagtcaatctccagttccgaagaaatcgtgccaaattccgtagaacagaaacatatacaaaaggaggacgtacctagtgaaagatacttgggctatctggagcagttgcttcgcctgaagaaatacaaagttccacaacttgaaattgtccccaattccgccgaagagaggctccatagcatgaaagaaggaatacacgctcagcagaaagagcccatgataggcgtgaaccaggagcttgcatacttttacccagaactgtttaggcaattttatcagcttgacgcatatccatccggtgcctggtattatgttcctcttgggacacaatacaccgacgcaccttccttctccgacatccctaatcctataggctctgaaaattctgagaagactactatgcctctttgg

SEQ ID NO: 157 - DNA, 642 bp, synthetic construct
  source 1..642: mol_type = other DNA
atgaagcttctcattttgacatgcctcgtagcagtcgcattggcaaggcccaagcatccaatcaagcaccagggtctgccacaagaggttctgaatgagaatttgcttcgtttttttgtggccccatttcccgaagtattcggtaaagagaaggttaatgagctgtccaaggatattggtagcgaatctacagaggatcaagctatggaagacataaaacagatggaggctgagagtatctcatcttccgaggagatagttcccaatagcgtcgaacagaaacatatccagaaagaagacgtcccatcagagagatatttgggttatctggaacagctcctccgcctcaaaaagtacaaggttccacagttggagatagtacccaattcagcagaggagcgcctgcacagcatgaaagaaggtatacacgcacagcagaaggaacccatgataggagtaaatcaggaactggcctacttttatcctgagctgttccgtcagttctaccaactcgacgcctatccatccggggcttggtactatgtccctctcggcactcagtacactgacgctccttcatttagcgatatacccaatcctataggctcagagaatagcgaaaaaacaactatgccactttgg

SEQ ID NO: 158 - DNA, 642 bp, synthetic construct
  source 1..642: mol_type = other DNA
atgaaactgctgattttgacatgtctggtggccgtagcccttgctaggccaaagcatccaatcaaacatcaggggctgccacaagaggtgttgaacgaaaaccttttgcgttttttcgtagcacccttccctgaggtctttggtaaggaaaaggttaatgaactgagcaaagacataggaagcgaaagtacagaggatcaagctatggaggacatcaagcagatggaggctgagtcaattagttcatctgaggaaattgtgcccaattcagtcgagcaaaaacatattcagaaggaagatgtgccttcagaacgttacctgggctatctggagcaactcctgaggctcaagaagtataaagtaccacagctcgaaatagtgcccaattctgccgaagaacgcctgcacagcatgaaggaaggaatacacgcacagcagaaggaacctatgataggggtcaaccaggagcttgcatatttctatcctgaattgttcaggcagttctaccagctcgacgcttatccatctggggcatggtactacgttccactgggtactcagtacactgacgcaccaagttttagtgacatccctaaccctataggctccgaaaactcagagaagactaccatgccattgtgg

SEQ ID NO: 159 - DNA, 642 bp, synthetic construct
  source 1..642: mol_type = other DNA
atgaagttgctcatcctgacatgtcttgtggcagtcgcactcgcccgccccaagcatcctatcaagcatcaaggtctgccacaggaagttctcaatgaaaaccttctgcgctttttcgtcgctccttttcccgaagtttttgggaaggaaaaagtcaacgaactgtctaaagatattggctcagagagcactgaggatcaagccatggaggatataaagcagatggaagccgagtcaatcagttcctccgaggaaattgtgcctaactctgttgagcagaagcatattcaaaaggaggacgtaccatccgaaaggtacttgggttacctcgaacaactgctgcgcctgaagaagtacaaagttcctcagttggagattgtacctaattccgccgaagagcgtctccattctatgaaggagggcattcacgctcagcaaaaggaaccaatgataggagtcaatcaagagctcgcctatttttatcctgaacttttccgccaattttatcaactcgacgcctatccttctggcgcatggtactatgtccccctgggtacccagtacactgacgccccttcatttagtgacattccaaatcccatagggagcgaaaactctgaaaaaactactatgcctttgtgg

SEQ ID NO: 160 - DNA, 642 bp, synthetic construct
  source 1..642: mol_type = other DNA
atgaaactccttatactgacctgcctggttgcagttgcacttgcaagacccaaacatcctataaagcaccaaggactgccccaagaggtcctcaacgagaatctgttgcgctttttcgttgctccatttcccgaggtgtttggtaaggagaaggtcaacgaattgtccaaggatataggcagcgagagcactgaagaccaggcaatggaagatataaagcagatggaggccgagagtataagttccagtgaagagattgtacctaactcagtggaacaaaagcatattcaaaaggaagatgtacccagcgaaaggtatttgggatatctcgagcaactccttagattgaagaaatacaaggtccctcagcttgagatagtgcctaacagtgctgaggaacgtctgcacagtatgaaagaaggcatacacgctcagcagaaagaacctatgattggcgtgaatcaagagcttgcctatttttacccagagctctttcgccaattttatcaactcgacgcttaccccagcggtgcatggtactatgtgcccctcggcacccaatatactgatgccccctctttttcagatattcctaaccccataggcagcgagaatagtgagaaaactacaatgccattgtgg

SEQ ID NO: 161 - DNA, 642 bp, synthetic construct
  source 1..642: mol_type = other DNA
atgaagcttctcatactgacttgccttgtcgccgtcgcactggcaagaccaaaacacccaataaaacaccaagggctcccacaggaggttctgaatgaaaatttgttgcgttttttcgtggctccttttcccgaggtttttggaaaggagaaagttaacgagttgagcaaagacatcggttcagaatccaccgaggaccaagctatggaagacatcaaacaaatggaggcagaaagcatatcctcctccgaggagatagtgcctaactcagtagagcagaagcatatacagaaggaagacgtaccctccgaacgctatcttggttacctggaacagctgctccgcctcaaaaaatataaagttcctcaacttgaaatagtcccaaattccgccgaagagcgccttcactctatgaaggagggcattcacgcccaacaaaaggaaccaatgataggtgtaaatcaggagttggcatacttttatcccgagctttttcgccagttctaccaactcgacgcatacccatctggtgcatggtattacgtcccccttggcacacagtacactgatgctccatccttctctgacattccaaaccctatcggatcagaaaactcagagaagaccacaatgcccttgtgg

SEQ ID NO: 162 - DNA, 642 bp, synthetic construct
  source 1..642: mol_type = other DNA
atgaagctcctgatactgacttgcctggtcgccgtagcacttgcccgccccaaacaccccataaaacatcagggtcttccacaagaggtacttaatgaaaatctcctgaggttttttgtagccccctttcccgaggtctttgggaaagaaaaggtcaacgaactcagcaaagacatcggctcagagtccaccgaagaccaggctatggaggacataaaacagatggaggccgagtctatctctagttccgaggagatcgtccctaacagtgttgaacagaagcacatccaaaaggaagacgttccctcagagaggtatcttggctatctcgaacaactgctgcgtctcaaaaaatataaagttccacaactcgagattgtgcctaatagtgcagaggaaagactccattcaatgaaggaaggcatacacgctcagcagaaggagcccatgatcggcgtaaaccaggaactcgcctatttttatcccgaactctttcgtcagttctatcaacttgatgcctatccttctggggcttggtactacgtcccattgggaactcagtacactgatgcaccctccttctctgacatacctaatcctattggctccgaaaactctgagaaaacaacaatgccactctgg

SEQ ID NO: 163 - DNA, 642 bp, synthetic construct
  source 1..642: mol_type = other DNA
atgaaattgcttattctgacttgcttggttgcagtcgcccttgctcgtccaaaacacccaataaaacaccagggcctgccacaggaggttctcaatgaaaatttgttgcgcttttttgtagcacccttccccgaggtatttggaaaagagaaagtaaacgagctctctaaggatataggatcagaatcaacagaggatcaagcaatggaggacattaaacagatggaggccgagtcaatatcctcctctgaggagatagtacccaactctgttgaacaaaaacacattcagaaagaagacgtgccctcagagagatatcttggctacctcgaacaacttctgcgtctgaagaaatacaaagtgccacagctcgagatcgtacccaatagtgctgaagagcgtttgcactctatgaaagaaggcattcatgctcagcagaaggaaccaatgattggagtaaatcaagagcttgcctatttctatcctgaactttttaggcagttttaccaactcgacgcctatccttctggcgcatggtattatgtgccattgggcactcaatatacagacgcaccatctttctctgatatacctaacccaatagggagcgaaaattcagaaaagactactatgccactctgg

SEQ ID NO: 164 - DNA, 642 bp, synthetic construct
  source 1..642: mol_type = other DNA
atgaagctcttgatcctgacttgcctggtagccgtcgctttggctcgtcccaagcacccaataaaacatcaaggactgcctcaagaagttctcaatgagaacctgctcaggttttttgtggctcctttcccagaagtctttgggaaggaaaaggtcaacgaactttctaaggatattgggagtgagtcaacagaagaccaggcaatggaggatataaagcaaatggaggccgagtctatctcctcatctgaagagattgttcccaatagtgtcgaacagaagcacattcagaaggaagatgtaccctcagagcgctatttgggttacctcgaacagcttctcagattgaaaaagtacaaggtccctcaactggaaatagtacccaactctgcagaggaacgtctccactctatgaaggagggcatacacgcccagcaaaaggaacctatgatcggggtcaatcaggagctcgcatacttctatccagaactgtttagacaattctaccaacttgatgcctacccaagcggtgcttggtattacgtgccactcggcacccaatataccgacgctcccagcttttctgatatccccaacccaataggctccgagaatagcgaaaaaaccaccatgcctttgtgg

SEQ ID NO: 165 - DNA, 642 bp, synthetic construct
  source 1..642: mol_type = other DNA
atgaagttgttgatccttacatgccttgtggctgttgccttggcaagacctaagcacccaataaaacaccaggggttgccccaggaagtcctgaatgagaatctcctgcgttttttcgttgcacctttccctgaggtcttcggaaaggagaaagtgaacgagcttagcaaggatatcggatcagagtcaacagaagaccaagcaatggaggacataaagcagatggaggcagagtcaatctccagttccgaggaaatcgtccccaatagtgtggaacagaagcacatccagaaggaggatgtgccatccgagagataccttggttaccttgaacagcttctgcgtctcaagaaatacaaagttccacaactggaaatcgtacccaactccgctgaagaaaggcttcattctatgaaggaaggtattcatgctcaacagaaagagcccatgatcggagtaaaccaggagttggcatatttctaccctgagttgtttagacaattctaccagctcgatgcttatccaagcggtgcttggtattacgttcctctggggactcaatatacagatgccccctccttctctgatatccccaaccctattgggagcgaaaattccgagaaaactaccatgcctctgtgg

SEQ ID NO: 166 - DNA, 642 bp, synthetic construct
  source 1..642: mol_type = other DNA
atgaagttgcttatacttacttgcctggtagcagtcgctctggcacgtccaaagcaccccataaaacaccagggcttgccacaggaagtcctcaatgagaacctgctgagatttttcgtagccccttttcccgaggtgtttggaaaggaaaaagtcaatgagctctcaaaagacatcggtagtgaatcaactgaagatcaggctatggaggacattaaacagatggaggcagagagcatttcttcatccgaagagatagtcccaaatagtgtggaacagaagcatatccagaaagaagatgtcccttctgagcgctaccttggctacctggagcagctcttgaggttgaaaaagtacaaagtccctcagttggaaattgtcccaaactcagcagaggagcgcctccactctatgaaggaaggcattcacgcacaacagaaagaacccatgataggggtgaaccaagaattggcctatttctaccccgagctttttcgccaattctaccaacttgacgcttacccctccggtgcatggtactacgtcccactcggtacccaatacacagatgcaccaagtttctctgacattcccaaccctattgggtcagagaactctgagaaaaccaccatgcccttgtgg

SEQ ID NO: 167 - DNA, 642 bp, synthetic construct
  source 1..642: mol_type = other DNA
atgaagctcttgatactcacctgcctcgttgcagtagcactggcccgccctaagcatcctataaagcaccaaggacttcctcaagaagttcttaatgagaatcttctgcgttttttcgtcgccccattccccgaagttttcgggaaggaaaaagtgaatgagttgagtaaagatattggctccgagtccacagaagatcaagctatggaggatattaagcaaatggaagcagagagcatttcatcatctgaagagatagtgcctaattccgttgaacaaaagcatattcaaaaggaggatgtaccctctgaacgttatctgggctatttggaacagctcctgagacttaaaaagtacaaggtacctcaattggagattgtaccaaattctgccgaggaacgtttgcattctatgaaagaagggatacacgcccaacaaaaagaacccatgatcggggttaatcaagagctggcctatttctacccagagctttttcgtcaattctaccagcttgacgcctacccatctggagcttggtattatgtcccacttggcactcaatatacagacgcacctagtttctccgatattcccaatcccattgggagtgaaaactctgaaaagacaactatgccactgtgg

SEQ ID NO: 168 - DNA, 642 bp, synthetic construct
  source 1..642: mol_type = other DNA
atgaaactgttgattctgacctgcctcgtggcagttgccttggctcgcccaaagcaccccattaaacaccaggggcttccccaggaagtactgaatgaaaatcttctgagatttttcgtagctcccttcccagaggtattcggaaaagaaaaagtcaacgaacttagcaaagacatcggaagcgaaagtaccgaggaccaggcaatggaagacatcaagcagatggaagccgaatctatatcaagtagcgaagaaattgttcctaattcagtagaacaaaaacacattcaaaaggaggatgttcctagcgaaaggtatctcggatacctggaacagctgctccgcttgaagaaatacaaggtgccacaactggaaatcgtaccaaactccgctgaggaacgcctccatagcatgaaagaaggcattcacgctcaacaaaaggagcctatgataggcgtgaaccaggagcttgcttacttctatcctgaacttttcagacaattttatcagttggacgcctacccctcaggggcctggtattatgttcctttgggcacacagtacaccgacgccccctccttcagtgatataccaaatcctattggaagtgaaaatagcgagaaaaccaccatgcctttgtgg

SEQ ID NO: 169 - DNA, 642 bp, synthetic construct
  source 1..642: mol_type = other DNA
atgaaactcctgatcttgacttgtcttgtcgcagtggctttggcacgtcccaagcaccctataaaacaccaaggtcttccccaagaggtgctcaacgagaaccttttgaggttttttgtggctccattccccgaggttttcggcaaagagaaagtcaatgaactgagcaaggatatcggttccgagagcaccgaggatcaggcaatggaggatatcaaacaaatggaagctgagagtattagttcatctgaggagattgtacctaactcagtggagcagaaacacattcagaaggaggatgtgccttcagaacgctacctcgggtacttggagcaactgttgcgtttgaaaaagtataaagtcccacagctggaaattgtacccaacagtgcagaagagcgtctgcacagcatgaaagagggtatacacgcacagcaaaaggaacctatgatcggtgtaaatcaagagttggcatacttttatcccgaactgttccgccagttttaccaactcgacgcatatcctagtggcgcttggtattatgtcccattgggtactcaatacactgacgctccatcctttagtgacatccccaatcccatcgggagtgaaaacagcgagaaaaccacaatgcctctttgg

SEQ ID NO: 170 - DNA, 642 bp, synthetic construct
  source 1..642: mol_type = other DNA
atgaagctcttgatattgacctgtttggtagccgttgccttggctagacctaagcaccctataaaacatcaagggcttccccaagaggttctcaatgagaaccttctccgcttttttgtagctccattcccagaggttttcggcaaagaaaaggtcaacgaactcagcaaagatatcgggtcagaatcaactgaagaccaagcaatggaggatataaaacaaatggaagctgagtccatatcctcaagtgaggaaattgttcccaattcagtcgaacagaagcatatccaaaaggaagatgtaccttccgagcgctatctcgggtatttggagcaactgctcagacttaaaaaatataaggtgccacaactggaaatagttccaaactcagccgaggagaggctgcatagcatgaaagaaggtatccacgcccagcagaaggaacctatgataggcgtgaatcaggaactggcatacttttatcctgaactgtttcgccaattttaccagcttgacgcctacccctctggggcatggtattatgtacctcttggtacacaatataccgacgcaccttctttctctgatattcccaatcccattggatcagaaaattctgagaaaacaacaatgcctctttgg

SEQ ID NO: 171 - DNA, 642 bp, synthetic construct
  source 1..642: mol_type = other DNA
atgaagctcttgatacttacctgtctggtcgccgttgctttggctcgccctaagcacccaattaaacatcaaggactgccacaggaagtactcaacgagaaccttttgcgcttcttcgttgcacctttccccgaagtgtttgggaaagaaaaagtaaacgagttgagcaaggacattgggtccgaatctaccgaagaccaagcaatggaggatattaagcaaatggaggctgagagtataagcagtagcgaagaaatagttcccaattctgttgaacagaaacacattcaaaaagaggatgtaccaagtgagagatacttgggttacctcgagcagctgttgagactgaagaaatacaaggtcccacaacttgagatagtgcccaacagcgcagaagagaggctgcatagcatgaaggaaggtatacatgcacaacaaaaggaacccatgataggcgtaaaccaggaacttgcatacttttatcccgagctgtttcgtcagttctatcagctggatgcctatcccagtggcgcttggtattatgttcccttgggaacccaatatacagacgcaccatcattctctgatattcctaatccaatcgggtctgaaaacagtgagaagacaactatgcctttgtgg

SEQ ID NO: 172 - DNA, 642 bp, synthetic construct
  source 1..642: mol_type = other DNA
atgaaacttcttatactgacttgccttgttgcagtagctctcgcacgtccaaaacacccaatcaaacaccaagggttgcctcaggaagtgttgaacgagaacctcctgcgttttttcgttgctccctttcccgaggtctttgggaaagaaaaagttaacgaattgtctaaagacattggtagtgaatcaaccgaggatcaagctatggaagacattaaacagatggaggctgaaagtatctcatcaagcgaagagattgtaccaaactccgttgaacaaaagcatatacaaaaagaggacgttcctagtgaaagatatttggggtatttggagcagcttctcagattgaaaaagtataaagttccccaactcgaaatagttcctaatagcgcagaggaacgccttcatagtatgaaagaagggatacatgctcagcaaaaagaaccaatgattggagtgaatcaggaactcgcttacttttatcctgagctcttcagacagttttatcagctcgatgcttatccctctggcgcttggtattacgtcccccttggcacacaatacactgacgccccatcctttagtgacattccaaacccaatcggcagcgagaactctgagaagacaacaatgcctttgtgg

SEQ ID NO: 173 - DNA, 642 bp, synthetic construct
  source 1..642: mol_type = other DNA
atgaagctcctgatcctcacttgtctggtcgcagttgcactcgccagacccaaacatcctattaagcatcagggtcttcctcaggaagtccttaacgaaaacctgttgagattttttgttgctcccttccctgaggttttcggaaaggagaaggtcaacgaactcagtaaggacatcggttccgagagtactgaagaccaagccatggaagatatcaagcaaatggaggctgagtctatttcttcttcagaggaaatcgttcccaattctgttgaacagaaacacatccagaaagaggacgttccttcagagcgttacttgggctatctggaacaactgcttaggttgaagaaatacaaggtccctcagctcgaaatagtccctaatagtgcagaggaaagacttcatagtatgaaggaaggaatccacgctcagcagaaggagcccatgattggagtaaaccaagagttggcatatttctatcctgaattgtttcgtcagttctatcaactcgacgcatatccctctggtgcatggtactatgtaccactgggtacacagtacaccgatgccccttcattctctgatataccaaaccctataggctccgaaaacagtgaaaagaccactatgcccctctgg

SEQ ID NO: 174 - DNA, 642 bp, synthetic construct
  source 1..642: mol_type = other DNA
atgaagctgctcattctgacttgcttggtcgctgttgcccttgcccgtcccaagcatccaataaaacatcaggggctgcctcaagaggtccttaatgaaaacctgctcagattctttgtagccccatttcccgaggtgttcggaaaggagaaggtaaacgaattgtccaaagatataggtagtgagtcaaccgaggatcaagctatggaagatataaagcagatggaagctgagtctatctcttcttccgaggagattgttcccaattcagtagaacaaaagcatattcaaaaagaagacgtgcccagcgagaggtatctgggttaccttgaacagcttctcaggctcaagaagtataaagtacctcagcttgaaattgtccctaattccgctgaggagaggcttcattctatgaaagaaggaatacatgcccagcagaaggagcccatgattggcgtgaatcaggaactggcctatttttaccccgagctttttcgtcaattctaccagctcgacgcctacccatcaggggcctggtactatgttcctcttggtacacaatataccgacgcaccttctttctccgatatacctaacccaatcggctctgagaactccgagaagactacaatgcccctgtgg

SEQ ID NO: 175 - DNA, 642 bp, synthetic construct
  source 1..642: mol_type = other DNA
atgaagttgcttatacttacctgtttggttgccgtcgccctggcccgtcctaaacaccctataaaacatcaaggactgccccaagaggtgctgaacgaaaatttgttgcgcttttttgttgcccccttccctgaagtgtttggaaaggagaaggtgaatgaactgtcaaaggatattgggtcagagtcaactgaagaccaagctatggaggacataaaacagatggaggccgaatctatatccagtagtgaagaaatcgtgcccaactctgtggagcaaaagcacattcagaaagaggatgtacctagcgagagatatctcggctatcttgagcaacttcttaggctcaaaaagtacaaggtgccacagttggaaattgtgccaaatagcgcagaggaacgtcttcacagtatgaaagagggcatacacgcacaacaaaaggaacccatgattggtgtaaaccaagaattggcatatttctatcctgaacttttccgtcagttctatcagctggacgcatatccatcaggcgcttggtattacgttccccttggcactcagtacaccgacgctcctagcttctccgatatccccaaccccatcgggagcgagaattccgagaaaactaccatgcctctctgg

SEQ ID NO: 176 - DNA, 642 bp, synthetic construct
  source 1..642: mol_type = other DNA
atgaaactcctcattctgacttgcctcgtcgccgtagccctcgcaagaccaaagcatccaattaaacatcaaggtcttccacaggaagtcctcaatgagaacctcttgagattttttgtggccccatttcctgaggtttttggcaaggaaaaagtaaatgaactctctaaggacattggatcagagtcaactgaggaccaggctatggaagacattaaacagatggaggcagagtcaatcagtagctctgaagagatagtaccaaatagtgtagaacagaaacatattcaaaaggaggatgttcctagtgaaagataccttggctatcttgaacagttgctgcgtttgaagaagtacaaagtccctcaacttgaaatcgttcccaacagcgctgaggaaagacttcactcaatgaaagagggcatccatgctcaacaaaaggaaccaatgataggagtcaaccaggagcttgcatacttctaccctgaactcttccgtcaattttaccaacttgatgcttacccttcaggagcctggtactatgttccactgggaactcaatacacagatgcaccctctttttctgacatcccaaatccaattgggtcagaaaattcagagaaaactacaatgcctctctgg

SEQ ID NO: 177 - DNA, 642 bp, synthetic construct
  source 1..642: mol_type = other DNA
atgaagctcttgattctgacttgtcttgtagcagtcgccctggcccgtcctaaacacccaataaagcaccaaggtcttccacaagaagtcctgaatgaaaatctccttcgttttttcgttgccccctttccagaagtgtttgggaaggagaaggtcaatgagctttctaaggatattggatccgagagtacagaggatcaagcaatggaggatattaagcaaatggaggccgaaagtatatcttccagcgaggaaattgttccaaattccgtagaacagaaacacatacaaaaagaggatgttccaagtgagcgctacctcgggtatcttgaacagctccttagactgaaaaagtataaagtaccccaattggagatagtgccaaacagcgcagaagagaggctgcacagtatgaaagaaggcattcatgctcaacaaaaggagccaatgataggagtaaatcaagaacttgcttacttctaccctgaactttttaggcagttttatcaacttgacgcttaccccagtggtgcatggtactatgtgcccctcgggacacaatacactgacgcaccatcattcagtgatatacctaaccccatcggatccgaaaactcagagaagactacaatgcccctttgg

SEQ ID NO: 178 - DNA, 642 bp, synthetic construct
  source 1..642: mol_type = other DNA
atgaaacttctcatattgacttgcctggtagcagtggctctcgcaagacctaaacacccaataaaacatcaagggttgcctcaagaggtcctcaatgagaacttgcttcgctttttcgtcgcccccttccccgaagttttcggtaaggagaaagtaaatgagttgtcaaaggacataggctcagagtcaactgaagatcaggcaatggaagatattaagcagatggaagccgagtccataagtagttcagaggagatcgtgccaaattctgtagaacaaaaacatattcagaaagaggacgtgccctctgagaggtacctcggatatttggagcagcttctgcgcttgaagaagtataaagtccctcaacttgagatagtaccaaattccgcagaagagaggttgcacagtatgaaggaagggattcatgcccagcagaaggagcctatgataggagttaaccaagaactcgcctatttctaccctgagctgttccgtcaattctatcagctcgacgcctatccctcaggggcatggtactacgttcctttgggcactcagtacactgatgcaccctccttctcagacatcccaaatcctataggctctgaaaatagcgaaaaaactaccatgcctttgtgg

SEQ ID NO: 179 - DNA, 642 bp, synthetic construct
  source 1..642: mol_type = other DNA
atgaagttgcttatcctcacctgcttggtcgccgttgcccttgctagacctaagcacccaattaaacatcaggggctgcctcaagaggtcctcaatgaaaacttgttgaggtttttcgtagccccatttcctgaggtgttcggaaaggaaaaggtcaacgaattgagcaaggacattggttccgagtctaccgaggaccaagctatggaggacataaagcagatggaggcagaaagcatctccagctccgaagaaattgttcccaattccgttgagcaaaaacatattcaaaaagaagatgttccatcagagcgttatttgggatacctggaacaactcctgcgcctcaagaaatataaagtgccacagttggagatagtacccaattcagctgaagagcgccttcatagtatgaaagaggggattcacgcacaacagaaggaaccaatgattggcgtgaatcaggagctcgcctacttctacccagagttgttcagacaattctaccagctggatgcttatccttcaggcgcttggtactacgtccctttgggaacacagtacactgacgcacccagcttctcagatattccaaaccctatcggctccgagaatagcgagaaaactacaatgccactctgg

SEQ ID NO: 180 - DNA, 642 bp, synthetic construct
  source 1..642: mol_type = other DNA
atgaaattgttgattctgacctgtctcgtggccgttgccctcgctcgcccaaaacaccccatcaagcatcagggcctcccccaagaggtccttaacgaaaatctgctgcgttttttcgtcgcacctttcccagaagtgttcggaaaagagaaagtaaatgaactttctaaggatataggcagcgaatccactgaagaccaggccatggaagatattaagcaaatggaagcagaaagcattagcagttccgaagagattgtccccaatagtgtcgaacagaagcacatacagaaagaagatgtcccctcagagcgttacctcggatacctcgagcaactcctccgtcttaaaaagtataaggtgccccagcttgagatagtgcctaattccgccgaggagcgtctccactccatgaaagaaggtattcatgctcaacagaaagaaccaatgattggagtcaaccaggagcttgcttacttctatccagagttgttccgtcaattctaccagctcgatgcctaccccagcggcgcatggtattatgtgcccctgggtacccaatataccgacgcaccttctttttcagacatccccaatccaatcggctcagaaaacagcgaaaaaactaccatgcccctttgg

SEQ ID NO: 181 - DNA, 642 bp, synthetic construct
  source 1..642: mol_type = other DNA
atgaagctcctgatccttacttgtctcgttgctgtggctctggcacgcccaaaacacccaattaagcaccagggtttgccacaagaagtcctgaacgaaaatttgctgagatttttcgtagctccattccccgaggtgttcggaaaagagaaggtcaatgaactctcaaaagacatcgggagtgagagtaccgaagatcaggctatggaggacattaaacagatggaggctgagtcaattagctcatccgaggagattgtccctaactctgttgaacaaaaacatattcagaaagaggatgtgccatccgagcgctatctgggttacctggagcagttgttgcgcttgaagaaatataaggtcccacagttggaaattgtacccaactcagccgaagaacgcctccacagcatgaaagagggtattcatgcacaacaaaaggagcctatgataggggtcaatcaggagctcgcctacttctatcccgagctctttcgtcaattttaccaactcgacgcttacccctcaggagcttggtattatgttccccttggcacccagtacactgacgcccccagcttttcagacatacccaacccaataggcagcgagaatagtgagaaaacaacaatgcccctctgg

SEQ ID NO: 182 - DNA, 642 bp, synthetic construct
  source 1..642: mol_type = other DNA
atgaaattgctgattctgacctgtctcgtcgcagtcgcccttgcacgcccaaagcatccaataaaacatcagggactcccacaagaagttttgaacgagaatcttttgcgcttttttgtagcaccattcccagaagtatttggcaaagagaaagtaaacgaactctcaaaggatataggttccgagtcaacagaagaccaggctatggaagatataaaacaaatggaagccgagagtatctccagttctgaagaaatcgttcccaacagtgtagagcagaaacatatacaaaaggaagatgttcccagtgagcgttacctgggttacttggaacagctgcttcgcctcaagaaatataaagtaccccagcttgaaatcgtgcccaactccgctgaggaaaggttgcactctatgaaagaaggcatccacgctcaacaaaaagagcctatgattggagttaatcaagaacttgcatatttttaccctgagttgtttcgccaattttaccaactcgacgcttacccttcaggggcatggtactacgtcccccttggaacccaatatactgatgccccatccttcagtgatattccaaacccaatcggtagtgagaactccgaaaagactactatgccactctgg

SEQ ID NO: 183 - DNA, 642 bp, synthetic construct
  source 1..642: mol_type = other DNA
atgaaactgcttatacttacttgcttggtcgccgtcgctctcgcaagacccaagcaccctataaagcatcaaggactcccccaagaagttcttaatgaaaatctgctcagattctttgtggctcccttcccagaggtctttggaaaggagaaggtaaatgaactgagtaaagacattggttccgaatccactgaggatcaggctatggaggacattaaacaaatggaggcagagagtatctcatccagcgaggagattgtgcccaattctgtagagcagaagcacatacaaaaagaggatgttccttcagaacgttatttggggtatctggaacaactgctcagactgaagaaatataaagttccccagctggaaattgtgccaaattcagccgaagagaggttgcattcaatgaaagagggcatccacgctcagcagaaagagcccatgataggtgttaatcaagaattggcatatttttaccccgaactctttagacaattctatcaactcgatgcctaccccagtggagcatggtattatgtgccccttggcacacaatatactgacgccccctccttcagtgatattcccaatcccatcggtagtgagaactcagaaaagacaacaatgcccctctgg

SEQ ID NO: 184 - DNA, 642 bp, synthetic construct
  source 1..642: mol_type = other DNA
atgaaattgcttatcctcacctgtctggtcgccgttgcattggctagacccaaacatcccataaagcaccagggactcccccaagaggtacttaacgaaaatctgctcagattctttgtggcaccatttccagaagtctttggcaaggagaaagtgaacgagctctcaaaagacataggcagtgagtccaccgaagaccaagctatggaggatatcaagcaaatggaagctgaatctatctcatctagcgaggaaatagtgcctaactccgtcgaacagaaacacatccaaaaggaagacgtgccttctgagcgctatctgggttatctcgaacagctcttgaggctcaagaaatacaaagtccctcagcttgagatcgtaccaaacagcgctgaagaacgtcttcatagcatgaaggaggggatacacgcccaacagaaagaaccaatgatcggtgtgaaccaagaattggcttacttttacccagagttgtttcgccagttttatcaactcgacgcatatcccagtggtgcctggtactacgtccctctcggcacccagtacacagacgccccctcattctcagacatacctaacccaatcgggtctgaaaattccgagaagaccacaatgccattgtgg

SEQ ID NO: 185 - DNA, 642 bp, synthetic construct
  source 1..642: mol_type = other DNA
atgaaacttctcattttgacctgcctggtggcagttgctttggcacgtcctaagcatcctatcaaacatcaggggcttccccaagaggttttgaatgaaaacctcctgcgcttttttgtagcaccatttcctgaggtatttggcaaggaaaaagtaaatgaactctcaaaagacatcggaagtgagagtacagaggatcaggctatggaggacataaagcaaatggaggcagaaagtataagttctagcgaggaaatcgttcccaattccgtggaacagaagcatatccagaaagaagatgttcctagcgagaggtatctcggctacctcgagcagcttctcaggctcaagaaatataaggtgccccaacttgaaatcgtacccaattctgcagaggagagactgcactctatgaaagaagggatccatgcacagcagaaggaacccatgatcggcgtcaaccaagaactggcctacttctatcccgaactctttagacagttctaccagttggacgcatacccaagcggggcctggtattatgtacctctcggcacccaatacactgacgccccatccttctcagatataccaaatccaattggttcagaaaattccgaaaaaacaactatgcctctttgg

SEQ ID NO: 186 - DNA, 642 bp, synthetic construct
  source 1..642: mol_type = other DNA
atgaaactgcttatcctcacctgccttgtggccgtagcactggcacgtccaaagcatcccatcaaacaccaaggcttgccccaggaagtgctcaatgagaacctccttcgcttcttcgttgcacctttcccagaagtgttcggtaaagagaaagtaaatgaactgagtaaagacataggaagcgaatcaaccgaggatcaagctatggaagacatcaagcaaatggaagcagaaagcatttcctcatctgaggagatagtacccaactctgtggaacaaaaacatatccagaaggaggacgtgccatcagaacgctatttgggttacctcgagcagctcctccgtctcaaaaaatataaagtcccacaacttgagatcgtgcccaatagtgcagaggaacgcctgcacagcatgaaagagggtatccacgctcaacaaaaagagcctatgatcggtgtaaatcaagagttggcttatttttaccccgaactttttaggcagttctaccagctcgatgcatacccaagcggggcttggtactacgtacccctgggtacccagtacacagatgcaccctccttcagcgacatcccaaacccaatagggagcgaaaactcagagaagaccacaatgcccctttgg

SEQ ID NO: 187 - DNA, 642 bp, synthetic construct
  source 1..642: mol_type = other DNA
atgaagctgctgatactgacttgtctggttgctgtcgcacttgcacgtcctaagcatcccattaaacatcaaggcctccctcaggaggttctcaatgagaatttgcttcgtttctttgtagccccctttccagaggtcttcggcaaagaaaaggtgaatgaactcagcaaagacattggaagtgaatcaacagaagaccaggctatggaagacatcaagcaaatggaagcagagtccattagttccagcgaagagattgtgccaaactccgtggagcaaaagcatatccagaaagaagatgtaccaagcgagaggtacttgggctatcttgaacagttgcttaggcttaagaaatacaaggtgcctcaattggagattgttcccaatagtgccgaggagaggttgcatagtatgaaggaagggatccatgcacaacagaaagaacccatgataggcgtaaatcaggagcttgcatacttttacccagaactctttcgtcagttctaccaactcgatgcctaccctagtggtgcctggtattacgtccctttgggcactcaatacacagacgcccctagtttctccgatattcctaatccaataggcagtgagaatagcgagaagaccaccatgccactttgg

SEQ ID NO: 188 - DNA, 642 bp, synthetic construct
  source 1..642: mol_type = other DNA
atgaaacttttgattttgacttgccttgtggcagtagccttggcacgcccaaaacaccccataaaacaccaaggtttgccacaagaggtgttgaatgagaaccttctcagattttttgtggcaccatttcccgaggtcttcggtaaagagaaagtcaatgaactctcaaaagacataggcagcgagagcaccgaggaccaggctatggaagacataaagcaaatggaagcagagagtatcagttcttcagaagagatagtgcccaatagcgtcgaacaaaaacacatacagaaggaggacgtaccctctgagcgttaccttgggtatttggagcaactgttgcgcctgaagaaatataaggtccctcaattggaaatcgtgcccaactcagcagaggagagactgcacagcatgaaagaaggcatccacgcacaacaaaaagaacccatgatcggagtgaaccaagagctcgcctatttttatccagaactgttccgccaattctaccaactggacgcctacccttctggcgcatggtattacgtgcctctgggcacacagtacaccgatgctccttctttcagcgatatacccaaccctattgggtccgagaacagcgaaaagacaaccatgcctttgtgg

SEQ ID NO: 189 - DNA, 642 bp, synthetic construct
  source 1..642: mol_type = other DNA
atgaagttgttgattctgacatgtctcgtcgctgtagcactggcccgtcctaagcatcctataaagcaccaaggcctccctcaggaggttctgaatgagaatctgttgcgcttcttcgttgctccattcccagaggtgttcgggaaggagaaggtaaatgagctgtcaaaagatatcggcagtgagtcaacagaggaccaagctatggaggacatcaagcaaatggaagcagagagtattagctcaagtgaggagatagtacctaacagtgtagagcaaaagcacatccaaaaggaggacgttccatctgagcgctacctcggttacctcgagcagttgttgcgcttgaaaaaatacaaagtacctcagcttgagattgtgcctaattccgccgaagagcgccttcattctatgaaagaaggtatccatgcccagcagaaggagcctatgatcggcgtcaatcaggagctggcctacttctatccagagcttttccgtcaattctatcagttggacgcatatccatcaggggcctggtactacgtccccttggggactcagtacaccgatgcaccatctttttcagacatccctaatccaatagggtccgagaactccgaaaagaccacaatgcctctctgg

SEQ ID NO: 190 - DNA, 642 bp, synthetic construct
  source 1..642: mol_type = other DNA
atgaagctgctcatccttacttgcctcgtagctgtagcactggcaaggccaaagcaccctatcaagcatcaaggtttgccacaagaagtgcttaacgagaatcttctgcgtttctttgtagcccctttcccagaggtctttggaaaggagaaggtgaatgagttgtccaaggacattggaagtgagagcactgaggaccaagctatggaggacataaaacagatggaagccgagtccatctcttcatctgaagaaatagttcctaatagtgtagaacaaaagcatattcaaaaggaggatgttcctagtgaacgctatctcggctatcttgagcaacttctccgcttgaaaaaatacaaggtgccacagctggagatagtgccaaattccgctgaagaaagattgcacagtatgaaggagggaatccacgctcaacaaaaagagcctatgatcggcgtgaaccaggagcttgcctacttttatcctgaactcttcagacaattttatcaactcgacgcttatcccagcggcgcctggtattacgtccctttggggacacaatatactgacgccccctcttttagcgacatccctaatcccattgggtcagaaaatagtgagaagaccaccatgccactttgg

SEQ ID NO: 191 - DNA, 642 bp, synthetic construct
  source 1..642: mol_type = other DNA
atgaaactgctgattttgacctgccttgtggcagtggcactcgccaggcctaagcatccaataaaacatcaaggtcttccccaagaggtgttgaacgaaaatctgcttcgctttttcgtagccccattcccagaagtattcggcaaggagaaggtgaacgagctgtctaaagacatcgggtccgagtctacagaggaccaagcaatggaggacatcaagcaaatggaagccgagagcatctcatcaagtgaggaaattgtaccaaatagtgtggaacaaaagcatattcaaaaggaggatgtccctagtgagagatacctgggttatctcgaacaactgctgaggcttaaaaaatataaagttccacaacttgaaatcgtccctaattcagccgaagagcgtctgcattccatgaaggagggtatccatgcacaacaaaaggaaccaatgattggggttaaccaagaactggcatatttctacccagaactgttcagacaattttaccaactcgacgcttatccaagtggtgcctggtattatgtgccactgggaactcaatatactgacgctccctccttcagcgacatacctaaccctattgggtcagaaaattccgagaaaactaccatgcctctctgg

SEQ ID NO: 192 - DNA, 642 bp, synthetic construct
  source 1..642: mol_type = other DNA
atgaagctgttgatcctgacctgcttggtcgctgtagccctggcaaggcccaagcacccaatcaaacatcagggtttgccacaggaggtcctgaacgaaaatttgcttcgctttttcgtcgcaccatttcctgaggttttcgggaaggagaaagttaatgaattgtcaaaggatattggatccgaaagtaccgaggaccaggcaatggaagatatcaagcagatggaggcagagagcattagttcatcagaagagatagtccccaattctgtagagcaaaaacatattcagaaagaggatgttccttccgagaggtatctgggatatttggagcaattgctgcgtcttaaaaagtataaggtaccccaattggaaatcgtgcccaacagcgctgaagaacgtcttcatagcatgaaagaagggatccacgcacaacaaaaggaacctatgattggtgtgaatcaagaactggcttatttctatcccgaattgtttcgccaattctaccaacttgacgcatacccttcaggagcctggtactatgtacccctgggcacccagtacacagacgcaccctctttttcagacattccaaatccaattggctccgagaacagtgagaaaacaactatgcctctgtgg

SEQ ID NO: 193 - DNA, 642 bp, synthetic construct
  source 1..642: mol_type = other DNA
atgaaacttttgatactcacttgtcttgttgccgttgcactcgcaaggccaaagcatcccatcaaacaccaagggctccctcaggaagtcctgaacgaaaatcttttgagatttttcgtggcccctttccccgaggtattcggaaaagaaaaggtgaatgagctgagtaaagacatcggttcagagagcacagaagatcaggctatggaagatattaaacagatggaggctgagagtatttcttcaagcgaggaaatcgtccccaattcagtcgaacagaagcatattcaaaaggaggatgttccaagtgaaagatacctcggttatcttgaacaattgttgaggcttaaaaagtataaagtcccccagcttgagatagtgcctaacagcgcagaagagagactgcacagtatgaaagaagggattcacgctcagcaaaaagagcctatgatcggagtaaatcaggaactcgcatacttttacccagagttgttcaggcaattttatcagttggatgcatacccctcaggagcatggtattacgtccctctgggtacacaatacactgatgcccctagtttcagcgatatacctaacccaatagggtctgaaaactctgagaagactacaatgcctttgtgg

SEQ ID NO: 194 - DNA, 642 bp, synthetic construct
  source 1..642: mol_type = other DNA
atgaaattgttgatattgacttgtctggtggctgtggcattggcccgccctaagcacccaattaagcaccagggtctgccacaagaggtcctcaacgaaaacctcctgagattcttcgttgctccttttcctgaggtttttggcaaagagaaagtcaatgagctttccaaggacattggaagtgaatctacagaggatcaagctatggaggacatcaaacaaatggaggccgagagcatttccagctctgaagaaatagtgccaaactctgtcgaacaaaaacatattcaaaaagaagatgttccttctgaacgctacctggggtatcttgagcagcttctgcgtctgaaaaaatataaagttccacagttggaaattgttcctaactcagccgaagaacgtctgcatagcatgaaggaagggatccatgcacagcaaaaggagcccatgattggtgtcaaccaagagctcgcatatttctaccccgaactttttcgtcaattttaccaacttgacgcatatcccagtggtgcttggtactatgtccctcttggaacccagtacacagatgcacctagcttctcagatattcctaatcccatcgggtccgagaactctgagaagacaactatgccactctgg

SEQ ID NO: 195 - DNA, 642 bp, synthetic construct
  source 1..642: mol_type = other DNA
atgaaacttctcatacttacctgccttgtagcagtggcactggctagacctaaacaccccataaaacatcaaggactccctcaggaggtcctgaacgagaatctgcttaggttttttgtcgcaccatttcccgaagtcttcggtaaagagaaggtaaatgaattgtctaaggatatcggaagcgaatctacagaagaccaggcaatggaagacattaaacaaatggaagcagaaagcatctcttcttcagaggagatagtgcccaacagtgtcgaacagaagcacatccaaaaagaggatgttccttctgaacgctatcttggttacctggagcagcttttgagactgaaaaagtacaaggtgccccagttggagatcgtccccaattctgctgaggagcgtttgcatagcatgaaagaagggatacatgcacaacagaaggaacccatgatcggagtaaaccaagaacttgcctacttttaccctgaactcttccgccaattctaccagcttgatgcatacccttcaggcgcttggtactatgtgcccttgggtactcagtacactgatgcccctagcttcagtgacataccaaaccctatcggctcagaaaactccgagaagacaaccatgcccttgtgg

SEQ ID NO: 196 - DNA, 642 bp, synthetic construct
  source 1..642: mol_type = other DNA
atgaagctcctcatcctcacatgcctggtggctgttgcactcgccaggcccaaacacccaataaagcaccagggcttgcctcaggaggtgcttaatgagaatctcctgaggttctttgttgcaccctttcctgaggtgtttggcaaggaaaaagtcaacgagctctccaaggacataggatcagagtctacagaagaccaggctatggaggatattaagcagatggaagcagagagtatttctagttccgaagaaatcgtacccaactcagtggaacagaagcacatacagaaagaggatgtacctagtgaaagatacttggggtacctcgaacagttgctccgcctcaagaaatacaaagtcccccaactcgaaatagtgcccaactctgcagaggaaaggttgcattctatgaaggagggaatacacgctcaacagaaggaaccaatgatcggggtcaaccaggaactggcttacttttatccagaactgttcaggcagttctatcagctcgatgcttatccaagtggcgcttggtactacgtgcctctcggcacacaatataccgatgctccctccttttcagacatacctaatcccattggtagtgagaactcagagaagacaaccatgcccctgtgg

SEQ ID NO: 197 - DNA, 642 bp, synthetic construct
  source 1..642: mol_type = other DNA
atgaaactgctcatactgacttgccttgtggctgtagcactggctcgcccaaagcatccaataaaacaccagggactgccccaggaggtcttgaacgaaaaccttcttcgcttctttgtagcacctttcccagaagtatttggcaaggaaaaggttaatgagcttagtaaggacatcgggagcgaatctacagaagaccaggcaatggaagacataaaacaaatggaggccgaaagtatttcatctagcgaagagattgtgcctaactccgttgaacaaaagcatattcaaaaggaagacgttccctctgaaaggtatttggggtatttggagcagcttttgcgtctgaagaaatacaaagtgccacagcttgaaatagtgccaaattccgcagaggaacgccttcattctatgaaagaagggatccatgctcaacaaaaggagccaatgataggtgtgaatcaggagcttgcctacttctaccccgaactcttcaggcagttttatcaactcgacgcctaccctagcggtgcatggtactacgtcccccttgggacacaatacactgacgctcctagcttttcagatattccaaatcccatcggcagtgaaaactctgaaaaaactaccatgccactttgg

SEQ ID NO: 198 - DNA, 642 bp, synthetic construct
  source 1..642: mol_type = other DNA
atgaaacttttgatattgacctgtcttgtagcagtagcactcgccagacccaaacaccccataaaacatcagggacttccccaagaagttctcaacgaaaacttgctgcgttttttcgtggctccttttccagaggtctttgggaaagagaaagtcaatgagcttagcaaggatattggcagtgaaagcaccgaagaccaagcaatggaggatattaagcaaatggaagccgaaagcatcagtagttcagaagaaatagtccccaactccgtcgaacaaaagcacatacaaaaggaagatgtgcccagtgagaggtacttggggtatctcgaacaactcttgcgcctgaagaaatacaaggttccccagctggaaattgtacctaacagtgctgaggagcgtcttcactctatgaaagaaggtatacacgctcaacaaaaagagcctatgataggcgtgaaccaagagcttgcctacttttaccctgagttgttcaggcaattttatcagctggacgcctatccttcaggagcatggtattacgtacctttgggaacacaatatacagacgcccctagcttcagtgatatacctaaccccattggcagtgaaaactctgagaagaccaccatgccattgtgg

SEQ ID NO: 199 - DNA, 642 bp, synthetic construct
  source 1..642: mol_type = other DNA
atgaaattgttgatactcacatgcctggtagctgttgcccttgcacgtccaaagcatcccatcaagcaccaaggtcttccccaagaagttctgaatgaaaatctcctcaggtttttcgtagctcctttccccgaggtatttggcaaagaaaaggttaacgagctgagcaaggatattggcagtgaaagcaccgaagaccaggcaatggaggatattaagcagatggaagctgagtcaatcagctcttccgaggagatagtccctaacagcgttgagcaaaagcatatacaaaaggaggacgtaccatcagagcgttatctgggttatttggagcagcttttgcgtctcaaaaaatacaaggttccacaactcgagatcgtacccaattctgctgaggaaaggctccatagcatgaaggaaggaattcatgctcaacaaaaagagcccatgataggtgttaatcaggaattggcatatttttatcctgagctttttcgccagttctaccaactcgatgcctaccctagcggtgcctggtattacgttcccctgggaacccagtacacagatgccccatccttctctgacatccccaaccctatagggagcgagaactccgagaaaactaccatgccactgtgg

SEQ ID NO: 200 - DNA, 642 bp, synthetic construct
  source 1..642: mol_type = other DNA
atgaaacttctcatccttacctgtcttgtggctgttgctcttgcccgtccgaagcacccaatcaagcatcaagggcttccccaagaggtactgaacgaaaatctactcagattcttcgtggctccatttcctgaggtatttgggaaggaaaaggtgaatgagctgtctaaagacataggctctgaatcaactgaggaccaagctatggaggatataaagcaaatggaggccgaatccatatcctcaagcgaggaaatcgttccaaattccgtcgaacagaagcatattcaaaaggaggatgtgccttctgagcgttaccttggatatcttgaacagttgctgagactcaagaaatacaaggtcccccaacttgaaattgttcctaactcagccgaagagaggttacactctatgaaagaggggattcatgctcaacagaaggagcctatgatcggtgtgaatcaagaactggcatacttctatcccgaactgtttcgtcaattttatcaattagatgcctatccatccggggcttggtattatgtgcctcttgggacacagtatactgatgcaccaagtttttcagacatcccaaacccaataggcagtgagaattcagaaaagaccacaatgcctctttgg

SEQ ID NO: 201 - DNA, 645 bp, synthetic construct
  source 1..645: mol_type = other DNA; note = alpha-S1 wild type
atgaaacttctcatccttacctgtcttgtggctgttgctcttgctaggcctaaacatcctatcaagcaccaaggactccctcaagaagtcctcaatgaaaatttactcaggttttttgtggcaccttttccagaagtgtttggaaaggagaaggtcaatgaactgagcaaggatattgggagtgaatcaactgaggatcaagccatggaagatattaagcaaatggaagctgaaagcatttcgtcaagtgaggaaattgttcccaatagtgttgagcagaagcacattcaaaaggaagatgtgccctctgagcgttacctgggttatctggaacagcttctcagactgaaaaaatacaaagtaccccagctggaaattgttcccaatagtgctgaggaacgacttcacagtatgaaagagggaatccatgcccaacagaaagaacctatgataggagtgaatcaggaactggcctacttctaccctgagcttttcagacaattctaccagctggatgcctatccatctggtgcctggtattacgttccactaggcacacaatacactgatgccccatcattctctgacatccctaatcctattggctctgagaacagtgaaaagactactatgccactgtggtga

SEQ ID NO: 202 - DNA, 666 bp, synthetic construct
  source 1..666: mol_type = other DNA
atgaagtttttcattttcacctgcctcctcgcagtcgcacttgctaaaaataccatggagcatgtttcatccagtgaggaaagcattatttcccaagagacctataagcaggaaaagaatatggctattaacccatcaaaagagaatctttgttcaacattttgcaaagaagtagttaggaatgccaatgaggaagaatactccattgggtccagctcagaggagtcagccgaagtagcaaccgaggaggtaaaaattacagtcgatgataagcactatcaaaaagctctcaacgagatcaatcaattctatcagaaattcccccaatatctccagtatctctatcagggaccaatagttttgaatccttgggatcaggtgaagcgcaacgcagtgcccatcactccaactttgaacagagaacagttgagcaccagcgaggagaactcaaagaaaaccgtggatatggaatctaccgaagttttcaccaaaaaaacaaaactcacagaggaggagaaaaaccgcctcaactttctgaaaaaaatatcacagcgttaccagaagtttgccttgccccagtacctgaagactgtatatcaacatcaaaaggccatgaaaccttggatccaaccaaaaactaaggttatcccatatgttagatacttg

SEQ ID NO: 203 - DNA, 666 bp, synthetic construct
  source 1..666: mol_type = other DNA
atgaaattttttatatttacttgcctcctggcagtcgccttggctaaaaacactatggaacacgtgtcaagttcagaggaatctattatatctcaggaaacttacaagcaggagaaaaatatggctataaatccatctaaggagaacttgtgcagtacattctgcaaggaagtagttaggaatgctaatgaggaggagtatagtatcggctcatcttccgaagagtcagcagaagtggctactgaagaagtaaagatcacagtagatgacaagcactaccaaaaggctctgaatgaaataaatcagttttaccaaaagtttcctcagtatctgcaatatctgtatcaggggccaatcgtgcttaatccatgggatcaagtcaagagaaacgctgtccccatcactccaacattgaaccgcgaacaacttagcacctcagaagagaactctaagaagacagtagacatggaatctacagaggtattcactaaaaagactaagcttaccgaggaggaaaaaaacagactcaatttccttaagaaaatatcccagcgttaccaaaaatttgcattgcctcagtatcttaaaactgtttaccagcaccaaaaagctatgaaaccctggatacaaccaaaaaccaaggtaataccttatgttaggtatttg

SEQ ID NO: 204 - DNA, 666 bp, synthetic construct
  source 1..666: mol_type = other DNA
atgaaattttttatctttacttgtttgctcgccgttgctttggctaagaatacaatggagcacgtgtcctctagtgaggaatctataatctcacaggaaacctataaacaggaaaagaatatggctatcaatcctagcaaagagaacctctgttcaactttctgtaaggaagtagtccgtaatgccaatgaagaagaatacagtataggctcatcctccgaggagagtgccgaggttgccacagaggaagtgaagataacagtagatgataagcattatcaaaaggctctgaatgagataaatcagttctatcaaaaattcccccaatacttgcaatacctgtatcaaggtcctatagtgctgaacccttgggatcaagttaaaaggaatgccgtgcctattacaccaactttgaacagggaacagctcagtacatcagaagaaaatagcaaaaaaacagtggatatggagagtaccgaggtcttcactaaaaaaaccaagctcacagaggaggaaaagaataggcttaatttcttgaaaaagataagtcaaaggtatcagaaatttgctctgccacaatatctcaagacagtctaccagcatcagaaagcaatgaaaccctggattcagcccaagacaaaagtaataccttacgtccgctatctc

SEQ ID NO: 205 - DNA, 666 bp, synthetic construct
  source 1..666: mol_type = other DNA
atgaaattttttatcttcacatgtctgctcgccgtcgcccttgctaagaatacaatggagcacgtcagttccagcgaagagagtatcatatctcaggaaacttacaagcaagagaagaacatggctattaatccaagtaaggagaatttgtgtagcactttttgtaaggaagtggttagaaatgccaacgaggaggagtacagtatcggaagcagttcagaggaaagcgcagaggttgctaccgaggaagtgaagattaccgtagacgataagcactaccaaaaagcactcaatgagatcaatcagttttatcagaaattcccccagtatcttcagtatctctatcagggtcctatcgtgcttaacccctgggaccaagttaaacgcaacgctgttcctataactcctactcttaaccgcgagcaactgagtacttcagaggagaatagtaagaagaccgttgatatggagagcacagaagtcttcaccaagaagaccaaattgacagaggaggaaaaaaaccgccttaactttttgaaaaagattagtcaacgttaccaaaaattcgccttgccacagtatcttaaaactgtctaccaacaccaaaaggcaatgaaaccctggattcaaccaaaaacaaaagtaatcccttacgtcagatacctg

SEQ ID NO: 206 - DNA, 666 bp, synthetic construct
  source 1..666: mol_type = other DNA
atgaaattcttcattttcacatgtttgctggccgtggctttggctaaaaacaccatggaacacgtcagttcttcagaggaatctataatttcacaggaaacatacaaacaagagaaaaatatggctatcaaccctagcaaggaaaatttgtgcagcaccttctgtaaagaagtggtccgtaacgctaatgaagaggaatattccatcggctcaagctctgaggaatccgctgaggttgctactgaagaggtgaagatcaccgttgatgacaagcactatcaaaaagcactcaatgaaataaaccagttctaccaaaagttccctcaatacctccaatatttgtaccaaggtcccatagtgctcaatccatgggatcaagtcaaacgcaacgccgtaccaatcacacctacactgaatagggagcagctgtcaacttctgaggagaactccaaaaaaacagtagatatggaaagcaccgaggtgtttacaaagaaaaccaaactgaccgaagaggagaaaaatcgcctgaattttttgaagaaaatatctcaacgctatcaaaaatttgctctgccacaatacctgaaaactgtgtaccaacatcagaaggcaatgaagccttggattcaacccaagacaaaagtaataccttatgtgaggtacctg

SEQ ID NO: 207 - DNA, 666 bp, synthetic construct
  source 1..666: mol_type = other DNA
atgaagtttttcatctttacttgcttgttggctgtagcacttgctaagaatacaatggagcacgtttccagctcagaagagagtatcatttctcaggaaacatacaaacaagagaagaatatggccattaatccctcaaaagaaaacttgtgttctactttttgtaaggaggtggtgaggaatgcaaatgaagaagaatacagcattggttctagttctgaagagtctgccgaagttgctaccgaagaagttaaaattaccgtcgacgacaagcactatcagaaagccttgaacgaaatcaatcagttctatcaaaaattcccacagtatttgcagtatttgtaccagggtcctatagttttgaatccttgggatcaggtcaagcgtaacgccgttcccatcacacccacactgaaccgcgaacaactgtccacttcagaagagaatagcaagaagaccgttgatatggaatccactgaggttttcactaaaaagactaagctcaccgaggaggaaaagaaccgccttaatttcttgaaaaagatcagccagaggtaccaaaaattcgcattgcctcagtatctgaagactgtttatcagcatcagaaggcaatgaagccttggattcagcctaaaaccaaggtgatcccctatgtgcgctatctc

SEQ ID NO: 208 - DNA, 666 bp, synthetic construct
  source 1..666: mol_type = other DNA
atgaagttttttatatttacatgtctgttggctgtcgccctcgctaaaaataccatggagcatgtcagcagtagtgaggaaagcattatttcccaagaaacttacaaacaggagaagaacatggccattaacccctccaaagaaaacctttgctctacattttgtaaagaagtggtgagaaatgcaaacgaggaggagtatagcataggttcaagctccgaggaatctgctgaagtagctaccgaggaagtaaagatcaccgtagatgataagcattatcaaaaagccctgaatgagattaatcagttctaccagaaattcccacagtaccttcaatatctttatcaaggccctatcgttcttaacccctgggaccaagtcaaaaggaacgctgtaccaataactcctaccttgaatagagaacaactgtctacttccgaggaaaactctaagaaaaccgtcgatatggaatccaccgaggtgttcactaagaaaacaaagctcaccgaagaagaaaaaaatagactgaacttccttaagaagatcagtcaaaggtatcagaagttcgcactgccacagtacctgaagaccgtgtatcagcatcaaaaggcaatgaagccttggattcaacccaaaactaaggtgataccttacgttcgctatctt

SEQ ID NO: 209 - DNA, 666 bp, synthetic construct
  source 1..666: mol_type = other DNA
atgaaattttttatttttacttgcttgcttgccgtagcattggctaaaaatacaatggagcatgtaagtagttccgaggaaagcatcattagtcaggaaacatataaacaagaaaagaatatggcaataaacccttccaaagaaaacttgtgttctacattctgcaaggaagtggtaagaaatgcaaatgaagaagaatactctataggatcatcctctgaggaaagtgctgaggtcgccaccgaggaagttaagataaccgtggatgataaacattaccaaaaggctttgaacgaaattaaccagttttaccagaaattcccccagtacctgcaatacctgtatcaaggacctattgtccttaatccctgggatcaagttaaacgcaacgctgtcccaatcactcctacactcaatcgtgagcaactgtcaacatccgaagagaatagcaagaagacagtcgacatggagagcactgaggtgttcaccaaaaaaacaaaacttaccgaagaggaaaagaaccgccttaatttcctgaagaaaatcagccagcgttaccagaagttcgctcttccacagtatcttaaaactgtttaccaacaccaaaaagccatgaaaccttggatccagcccaagaccaaggtaattccttatgtgcgttatctc

SEQ ID NO: 210 - DNA, 666 bp, synthetic construct
  source 1..666: mol_type = other DNA
atgaaattctttatatttacttgcctccttgccgtggctcttgcaaaaaatactatggagcacgtctcatcctccgaagagtctataatatcccaagaaacctacaaacaggagaaaaacatggcaattaatccttcaaaggagaacttgtgttccacattctgcaaggaagtggtccgtaatgctaacgaggaggagtattccattggcagcagttcagaggaaagcgcagaggtggctactgaggaagtgaaaataaccgtggacgacaagcattaccaaaaggcactgaatgagatcaatcagttctatcagaaatttccccagtacctgcaatatctctaccaaggaccaatcgtactgaacccctgggatcaagtcaagaggaatgctgttcctataaccccaactctgaaccgcgagcaactgagtaccagcgaagaaaactctaaaaagaccgtagacatggagtcaaccgaagtatttactaagaaaaccaagttgacagaagaagaaaaaaaccgcctcaacttcctcaaaaagatctcacaacgctatcaaaagttcgcattgcctcaatacctgaaaaccgtctatcaacaccagaaagcaatgaagccatggatacaaccaaaaacaaaggtaatcccctacgttcgttacctc

SEQ ID NO: 211 - DNA, 666 bp, synthetic construct
  source 1..666: mol_type = other DNA
atgaagttctttatatttacctgtctgttggccgtagcactcgctaagaatacaatggagcatgtcagttcttctgaagaaagtattatttcccaggaaacctacaagcaggaaaagaatatggccatcaaccccagtaaggagaatctgtgctccactttttgtaaggaagtagttaggaacgctaatgaggaggaatacagtattggatcttcatccgaagagagtgctgaggtggcaaccgaagaagtcaagattacagtagacgataaacattaccagaaggccctcaacgagatcaaccagttctatcagaagtttccccaataccttcaatacctgtaccaaggcccaattgtactcaacccttgggatcaagtcaaacgcaatgctgtccctataacacctacccttaacagagaacagctcagcacttcagaggaaaattctaagaaaacagtagacatggaaagcaccgaggtatttactaagaaaacaaagctgactgaagaggaaaaaaatcgtctcaattttctgaagaagatcagtcagcgttatcaaaagttcgcactgccccagtatttgaaaaccgtctatcagcatcagaaagccatgaagccttggattcaacccaagactaaggttattccctatgtgaggtatctg

SEQ ID NO: 212 - DNA, 666 bp, synthetic construct
  source 1..666: mol_type = other DNA
atgaagttttttatctttacatgcttgctcgcagtggctctggcaaaaaatactatggagcacgtctcctccagcgaagagagcataataagccaagagacatacaagcaggagaaaaatatggcaatcaatccatctaaagaaaatctgtgttccactttctgcaaagaggtagtcaggaacgcaaatgaggaggaatacagtataggatcttcctctgaagaatcagccgaagttgccactgaggaggttaaaattactgtggacgataagcactatcagaaagccttgaacgagattaaccaattttatcagaaattccctcaatatctccagtacctgtatcaagggcccatagtcctgaatccctgggaccaagttaaaaggaacgccgtaccaataactcccactttgaatagagagcaactttcaaccagtgaggagaattccaaaaagactgtagatatggaatctacagaagtgtttacaaaaaaaaccaagctgacagaagaggaaaaaaaccgcctcaatttcctcaaaaagatatctcagcgttaccagaaattcgccctccctcaatatctgaaaacagtgtaccaacaccaaaaagctatgaagccctggattcagcctaaaacaaaagtcatcccctacgtacgctacctc

SEQ ID NO: 213 - DNA, 666 bp, synthetic construct
  source 1..666: mol_type = other DNA
atgaagttttttatttttacttgcctgttggccgtcgctcttgccaagaacaccatggagcatgtgtcctcttctgaagaatccattataagccaagagacatacaaacaggagaaaaacatggcaattaaccccagcaaagagaacctctgtagcaccttctgcaaagaggttgtgcgtaatgcaaatgaggaggagtatagcattggaagctcaagtgaagaaagtgctgaggttgctaccgaagaggtgaaaattactgtagacgataaacattatcaaaaagccctgaatgaaatcaaccagttttatcagaaatttccacagtacctccaatacctttaccaggggcccattgtgttgaatccttgggaccaagtaaagcgtaatgccgtccccataactcctacccttaaccgcgagcagcttagtacctccgaagaaaactctaaaaaaactgtcgatatggagtccaccgaagttttcactaagaagaccaagttgaccgaggaggagaagaatcgtctcaattttcttaagaagataagtcaaagataccagaagttcgccctcccacaatatctgaagacagtctaccagcatcaaaaggctatgaagccatggattcagcctaagacaaaagtgatcccttacgtgagatatttg

SEQ ID NO: 214 - DNA, 666 bp, synthetic construct
  source 1..666: mol_type = other DNA
atgaaattctttatctttacctgtcttcttgccgtggctcttgctaagaacaccatggagcacgtatcatccagtgaagaatccataatctctcaggagacctacaaacaagagaagaatatggctataaatccttctaaagaaaacctgtgcagcaccttctgcaaggaagttgtgaggaacgcaaacgaggaagaatactcaattggctcttcatccgaggagagtgctgaagttgccaccgaagaggtcaaaattacagtcgatgacaagcattatcaaaaagcattgaatgaaattaatcaattctatcagaaatttcctcagtacctgcaatacctctaccagggtcctattgttctcaatccttgggatcaagttaagagaaatgctgttcccattacaccaactctgaaccgcgagcaactctcaaccagcgaagagaactctaagaagactgttgatatggaatcaaccgaggtcttcactaaaaaaaccaaactgactgaagaagaaaagaataggttgaacttcctcaagaaaatcagccagagataccaaaaattcgcacttccccaatatttgaaaactgtataccagcatcaaaaggcaatgaaaccttggatacaaccaaaaacaaaggtaattccctatgtccgttacctg

SEQ ID NO: 215 - DNA, 666 bp, synthetic construct
  source 1..666: mol_type = other DNA
atgaagttcttcatcttcacttgcctcttggctgtagctctggctaagaacactatggagcatgtatcttcttctgaagagtccattatttcccaggagacctacaagcaagaaaaaaatatggcaattaatcctagcaaagaaaacctctgctcaactttttgtaaagaagtggtaagaaacgcaaacgaagaggaatactcaattgggagcagttcagaggagtctgccgaggtagctacagaggaggtcaaaattacagtagacgataaacactatcagaaggctctcaacgaaataaaccagttttaccagaaatttccacaatatcttcaatatctctaccaaggccctatagtcctgaatccatgggaccaggtgaaacgtaacgctgttcccattacacccacacttaaccgtgaacaactgtccaccagtgaagagaatagcaaaaaaaccgtggatatggaatcaaccgaggtctttaccaagaaaaccaaattgactgaggaggagaagaatcgtctcaattttctgaagaagatctcccagagataccaaaagtttgcactcccacaatatcttaaaactgtgtaccaacaccaaaaggctatgaaaccttggatacaaccaaagactaaagttataccctatgttagatacttg

SEQ ID NO: 216 - DNA, 666 bp, synthetic construct
  source 1..666: mol_type = other DNA
atgaaattctttatctttacctgcctgctcgcagtggctctggccaagaacactatggagcatgtatcatcatctgaagaaagtatcataagccaagagacctataagcaagaaaaaaatatggcaattaatcccagtaaggagaacctgtgttcaaccttctgtaaagaggtcgttaggaacgctaacgaagaggaatactccattggtagttcatcagaggaatccgcagaagtggcaaccgaggaggtaaagatcactgttgatgacaaacactatcaaaaggcactcaatgaaatcaatcagttttaccaaaagttcccccaatacttgcagtatctctaccaaggtcctatcgtattgaacccttgggatcaggtaaagcgcaacgccgtgccaataacacccacacttaacagggagcaactcagtacttcagaagagaacagcaaaaaaacagtcgatatggagtccactgaagtgttcactaaaaaaactaaattgactgaggaggaaaagaataggctgaactttttgaagaaaatttcacagcgctatcagaagttcgcccttcctcaataccttaaaactgtttaccaacatcaaaaggctatgaaaccttggattcaaccaaagactaaggtcataccatatgtacgttatctg

SEQ ID NO: 217 - DNA, 666 bp, synthetic construct
  source 1..666: mol_type = other DNA
atgaaattcttcatatttacctgtctgttggccgtcgctcttgcaaagaacaccatggagcatgtttcctcttcagaagaatccatcatatcccaggagacctacaagcaggagaagaatatggcaattaacccaagtaaagaaaatctctgttccactttctgcaaagaagtggtccgtaatgcaaacgaagaggagtactcaatcggctcttcaagtgaggaaagtgccgaggtggcaactgaagaagtcaaaataaccgttgacgacaaacattatcagaaggcactcaatgagataaaccagttctaccagaagttcccacagtatcttcagtatctttaccaaggacctatcgtacttaacccttgggaccaggttaagaggaacgctgtccccataacaccaactctcaatcgtgaacaattgagcaccagcgaagaaaattctaagaagaccgtagacatggaatcaaccgaggtattcactaaaaagacaaagttgacagaagaggagaaaaaccgcctcaattttctcaaaaagatttctcaacgttaccagaaatttgcactgcctcagtatctgaagactgtctaccagcaccaaaaagccatgaaaccatggattcagcccaagaccaaagtcataccctacgttaggtacttg

SEQ ID NO: 218 - DNA, 666 bp, synthetic construct
  source 1..666: mol_type = other DNA
atgaaattcttcatattcacatgcttgctcgctgtcgcactggccaagaacacaatggaacacgttagctccagtgaggagtcaataattagtcaggagacatacaaacaggaaaaaaacatggctataaatccttccaaggagaatctctgttcaacattctgtaaagaggttgttcgcaacgctaatgaagaggaatactcaattggtagcagttccgaagaaagtgcagaagtggctaccgaagaggttaaaatcactgttgacgacaaacattaccaaaaagcccttaacgaaataaaccagttctatcagaaattcccacagtaccttcaatacctgtaccagggtcccatcgtccttaatccatgggaccaggtaaaaaggaatgcagtacctataacacctacactcaacagagagcagttgtctacatctgaggagaatagcaagaagactgtagacatggaatctacagaagtatttactaagaagactaagcttacagaggaagagaagaatagattgaattttctcaagaaaatatcccaacgctaccagaagtttgccctcccacaataccttaagaccgtatatcaacaccagaaagctatgaaaccctggatacaacctaagacaaaggttattccctacgtgcgttatctt

SEQ ID NO: 219 - DNA, 666 bp, synthetic construct
  source 1..666: mol_type = other DNA
atgaagttctttatttttacctgtctgcttgctgtggctctcgccaaaaataccatggaacacgttagtagctcagaggagtctatcatatcccaggagacatacaagcaagaaaaaaatatggcaatcaacccatccaaggagaacctttgctccacattctgcaaggaagtagttaggaatgcaaacgaagaggaatactccataggttccagtagcgaagaatctgccgaggtcgccacagaagaagtgaaaattacagtagacgacaagcactatcaaaaagctctgaatgaaattaaccagttctatcagaagttccctcaatacttgcaatatctttaccaaggccctatcgtcctgaacccctgggatcaggtgaaacgtaatgctgtgccaatcactcccacactcaaccgtgaacaattgagcacaagcgaagaaaattccaaaaaaaccgtcgatatggagtctactgaggtattcacaaagaaaaccaaactcactgaggaggaaaagaacagactcaacttcttgaagaaaatttcacaacgttaccaaaaatttgctcttccacaatatctcaaaacagtttatcaacatcagaaggcaatgaaaccttggatccaacctaaaacaaaagttataccatatgtccgctatctc

SEQ ID NO: 220 - DNA, 666 bp, synthetic construct
  source 1..666: mol_type = other DNA
atgaagttcttcattttcacctgtctgctggccgtcgcactggctaaaaacaccatggagcacgtaagttcaagcgaagagtctatcatctcacaggagacatacaagcaggagaagaacatggccataaacccatccaaagagaacctctgttctactttttgcaaggaagtcgttcgtaacgccaacgaggaggaatactctataggcagcagctccgaagaatctgctgaggtagcaaccgaggaagtaaagattacagtagacgacaaacattaccagaaagccctgaatgaaattaaccagttttatcagaagttcccccagtaccttcagtacctctatcaaggccccattgtcctgaacccatgggaccaagttaaaaggaatgctgtaccaatcacacccaccctgaatagagagcagctttctacctcagaggaaaacagcaagaaaaccgtcgatatggaaagcacagaagttttcacaaagaagacaaagcttactgaagaagagaaaaatcgccttaactttttgaagaaaataagccaaaggtatcagaaatttgcactcccccaataccttaaaactgtctaccaacaccaaaaggcaatgaagccctggatacaaccaaagacaaaggtcattccctatgtacgctatctc

SEQ ID NO: 221 - DNA, 666 bp, synthetic construct
  source 1..666: mol_type = other DNA
atgaaattctttattttcacttgccttctcgctgtagctcttgccaaaaacacaatggaacatgtctcttcctccgaagaaagcatcataagccaagaaacctacaagcaggagaagaacatggcaataaacccatccaaggaaaatttgtgctcaacattctgtaaggaggtagtcagaaacgctaatgaagaggagtactcaataggcagcagctcagaggaaagtgccgaagttgccaccgaggaggtaaagatcacagtagacgataagcactatcaaaaagccttgaacgagatcaaccagttctatcagaaatttccacaatatctccaatacctctatcagggacctattgtgttgaacccatgggatcaagtaaagcgcaacgctgttccaatcactcccactttgaatagggaacagctctccacatctgaggaaaactctaaaaagacagtcgatatggaatcaactgaagtcttcaccaaaaagacaaaattgaccgaagaggagaaaaaccgcttgaattttcttaagaagatatcccagagatatcagaaatttgccttgccccaatacctcaaaactgtttatcaacatcagaaagcaatgaaaccatggatacagcctaagactaaggttattccatacgtcagatacctt

SEQ ID NO: 222 - DNA, 666 bp, synthetic construct
  source 1..666: mol_type = other DNA
atgaagttctttatcttcacatgtttgcttgcagtggctctggccaaaaacactatggagcacgtttcctcatccgaagaaagtattatctctcaggaaacatacaagcaggaaaagaacatggcaattaacccaagcaaagaaaacctttgttctactttttgtaaggaagtggtccgcaacgccaacgaggaggaatatagtattggttcttcttccgaagagtctgccgaggtcgcaacagaagaggttaaaataacagtagatgataaacattaccagaaggcactgaatgagatcaaccaattctatcagaaattcccccagtatctccagtacctttatcaagggccaattgttctgaatccatgggaccaggtgaagagaaatgcagtgcctatcaccccaactctcaatcgtgaacagctttctacctcagaggagaatagcaaaaagactgtagacatggagagcaccgaagtcttcacaaaaaaaactaaacttacagaggaagaaaagaaccgtcttaattttttgaagaagataagccaaaggtatcaaaagttcgcactccctcagtatctgaaaactgtgtatcagcaccaaaaggcaatgaagccctggattcaacccaagacaaaggtaataccctatgttcgttacctt

SEQ ID NO: 223 - DNA, 666 bp, synthetic construct
  source 1..666: mol_type = other DNA
atgaaattctttatctttacctgcctcctcgcagtcgcactcgctaagaacaccatggagcatgttagcagttcagaggagagcatcatcagccaagagacctacaagcaagagaagaatatggcaataaaccccagcaaggagaacctgtgcagtaccttttgtaaggaggtggttcgtaatgccaatgaagaggagtatagcattggaagttcttccgaggaaagcgcagaagttgcaaccgaggaagtcaaaattacagttgatgataagcattaccagaaggcccttaatgagataaaccaattctatcaaaaatttcctcaatacctgcaatatctctaccaaggccccatagtgttgaacccatgggaccaggtgaaaaggaatgccgttcctattaccccaactcttaatcgcgaacaactgagtacatctgaggaaaacagtaagaagacagtcgatatggagtcaacagaagtgtttaccaaaaaaaccaagcttaccgaagaagagaagaacagactgaacttcttgaaaaaaatctctcagaggtaccagaaattcgccctgccccagtatctcaaaaccgtatatcagcaccagaaggcaatgaagccctggattcagcccaaaaccaaagtgataccttatgtcagatatttg

SEQ ID NO: 224 - DNA, 666 bp, synthetic construct
  source 1..666: mol_type = other DNA
atgaagtttttcatctttacttgtctcttggctgtcgctcttgcaaagaataccatggaacacgtgagttcatctgaggaatccattatttctcaggagacttacaagcaggaaaaaaacatggccattaacccatccaaagaaaacctttgcagtaccttttgcaaagaggttgtgcgtaatgcaaatgaggaagagtactcaatcggaagtagctctgaggagtctgctgaagtagccactgaggaggttaagatcaccgtcgatgataaacactatcagaaagctctcaacgaaataaaccagttctatcaaaagttccctcagtacttgcagtatctctaccagggccctattgtacttaacccctgggatcaggtaaagagaaacgcagtccccataaccccaaccttgaacagagagcagctttccacctctgaagaaaattctaagaagactgtggacatggagtcaactgaggtgttcactaagaagaccaaattgaccgaagaggaaaaaaatagactcaactttctcaagaagatcagccagagataccaaaagtttgctctgccacaatatctgaagacagtatatcaacatcaaaaagccatgaagccctggattcaacccaagacaaaagttataccctatgtaaggtatttg

SEQ ID NO: 225 - DNA, 666 bp, synthetic construct
  source 1..666: mol_type = other DNA
atgaagtttttcattttcacctgtctgcttgctgtggcacttgcaaagaatactatggaacacgttagttcttcagaggaaagtataatttcccaggaaacctataaacaggagaaaaacatggcaataaacccctccaaagagaacctgtgcagcacattttgtaaagaagtggtgcgtaacgctaatgaggaggagtatagtatcgggtccagttcagaggaatctgctgaggtggccaccgaagaggtaaagatcactgtagatgacaagcattatcaaaaagcccttaatgaaattaatcaattttaccaaaagttccctcagtatttgcagtatctctaccaaggtccaatagttttgaatccatgggaccaagtgaagcgtaacgccgttccaattaccccaaccctgaaccgcgagcaactgagtacttccgaagagaactccaagaaaactgttgacatggagtccactgaagtattcacaaagaaaactaagctgaccgaagaggaaaaaaataggttgaacttcttgaagaaaatctcccagagatatcagaagtttgctctgcctcagtatctgaagacagtctatcaacatcaaaaggcaatgaaaccctggatacaacctaagactaaggttatcccttacgttcgttatctc

SEQ ID NO: 226 - DNA, 666 bp, synthetic construct
  source 1..666: mol_type = other DNA
atgaaattctttatctttacatgccttctggctgttgcccttgctaagaacactatggaacacgtctcatcaagcgaagagtcaataataagccaagaaacttataaacaggaaaagaacatggctatcaacccctccaaagaaaatctgtgttcaaccttttgtaaggaagtggtcaggaatgctaatgaagaggagtactccataggttcctcctctgaggaaagtgctgaggtggcaacagaagaggtaaaaataaccgtggatgataaacattaccagaaagccctgaatgagattaaccaattctatcaaaaatttcctcagtatctgcaatacctttaccagggacctatcgttcttaatccatgggaccaagtcaagcgcaatgccgtacctatcacaccaacactgaacagagagcagctcagtacatcagaagagaactctaaaaaaaccgtcgatatggagtccacagaagttttcactaagaaaactaagctcaccgaagaagaaaaaaataggttgaacttcctgaagaaaatttcccagcgttatcaaaaatttgccctgcctcagtatcttaaaacagtttaccaacatcagaaagccatgaaaccctggattcagcctaaaacaaaggtcataccttatgtcaggtatctc

SEQ ID NO: 227 - DNA, 666 bp, synthetic construct
  source 1..666: mol_type = other DNA
atgaagttttttattttcacctgcttgctcgctgttgccctcgctaaaaacacaatggaacacgtcagttcatcagaagagagtataatcagccaagagacatacaaacaagagaagaatatggcaataaatccaagcaaagaaaatctctgctctacattttgtaaggaggttgttcgcaatgctaacgaggaggagtattcaataggctccagctccgaagagtcagccgaggtagcaactgaagaggtgaagataactgtggatgacaaacattaccaaaaggcactgaacgaaatcaatcagttctatcaaaagttccctcagtatctccagtatctctaccaaggcccaatcgttctgaatccttgggaccaagtgaagagaaatgcagtacctatcactccaacacttaatagggaacagctgtctactagcgaggagaactctaaaaagacagtggacatggagagtaccgaggtatttactaagaaaacaaaactgacagaggaggaaaagaatcgcctgaatttccttaaaaaaatcagtcagcgttaccagaagttcgcccttccccagtacctcaaaaccgtatatcaacatcagaaggccatgaagccttggatccagcctaaaacaaaggtaatcccatatgtgcgctatctc

SEQ ID NO: 228 - DNA, 666 bp, synthetic construct
  source 1..666: mol_type = other DNA
atgaaattttttatctttacatgcctcttggctgtagctttggcaaaaaacactatggagcacgtttcatcttcagaggagtctattataagtcaggagacttacaagcaggaaaagaatatggcaataaacccctctaaagagaatctttgttctactttttgtaaagaagttgtcaggaatgctaacgaggaggagtatagcataggctcttcatctgaggagtctgcagaggtggcaactgaggaagtaaaaatcacagtggatgacaaacattaccagaaagccctgaatgaaattaaccagttttatcaaaagtttcctcagtatttgcagtacttgtatcagggtcccattgtgttgaacccctgggaccaggtcaagagaaacgcagtgccaatcacccctaccctcaaccgtgaacaactgagcacaagcgaagaaaattcaaaaaaaactgtagacatggagagcacagaagtgttcactaaaaaaaccaagttgacagaagaggagaagaaccgccttaattttctgaagaagatctctcagaggtaccaaaaattcgcccttccccaatatcttaaaaccgtttatcaacaccaaaaagctatgaaaccctggatacagcccaaaactaaggttataccctatgtgagatacctc

SEQ ID NO: 229 - DNA, 666 bp, synthetic construct
  source 1..666: mol_type = other DNA
atgaagtttttcatatttacttgtcttcttgccgtagccctcgcaaagaatacaatggaacacgtctcttcaagcgaggagtccatcatcagccaagaaacctataaacaggaaaagaacatggccataaacccctctaaagagaatttgtgtagcacattctgtaaggaagtagttcgcaacgcaaacgaggaagagtattctatcggatcatcttccgaggaaagcgccgaagtcgccactgaggaagttaagataacagtcgatgacaagcactatcaaaaggcactgaatgagattaaccagttttatcaaaagtttcctcagtacctgcagtatttgtaccagggacccattgtgcttaacccatgggaccaagtcaagcgtaacgccgtgccaatcacccccacacttaacagagaacaactgagcacctcagaggagaactcaaagaagactgtggatatggagtcaacagaggtgtttacaaagaaaacaaagctgacagaggaagaaaaaaatcgcctcaatttcctgaagaaaataagtcaaaggtaccaaaagtttgctctgcctcagtatctcaagaccgtctatcaacaccagaaggccatgaagccttggatccagcccaagacaaaggttatcccatatgtccgctatttg

SEQ ID NO: 230 - DNA, 666 bp, synthetic construct
  source 1..666: mol_type = other DNA
atgaagttcttcattttcacctgcttgttggctgtagcccttgcaaaaaataccatggaacacgtaagctcctctgaagagtctataatatctcaggaaacatataaacaggagaagaatatggcaattaaccctagcaaagaaaacctgtgcagcaccttttgtaaagaggttgtccgcaatgccaacgaggaagagtactcaataggcagctctagtgaggagtcagcagaagtggctacagaagaagtcaagattacagttgatgacaagcactatcaaaaggctctcaacgaaattaatcaattttatcaaaagtttcctcagtaccttcaatacttgtatcagggtcctatcgttcttaatccttgggatcaagtcaaacgtaatgcagtacccattaccccaactttgaaccgcgaacagctctcaacaagcgaagaaaactccaaaaaaactgttgatatggaaagcacagaggtctttacaaagaagactaagttgacagaggaggaaaagaaccgcctcaactttctgaaaaagataagccaacgttaccagaaattcgctttgcctcagtaccttaaaactgtgtaccaacatcagaaagccatgaaaccttggattcagcccaaaactaaggtaattccatatgtcaggtatctg

SEQ ID NO: 231 - DNA, 666 bp, synthetic construct
  source 1..666: mol_type = other DNA
atgaaattttttatctttacttgtctgctcgcagttgcacttgccaaaaacacaatggagcatgttagcagttctgaagagagcatcataagtcaagaaacctacaagcaagagaagaacatggctatcaatcccagtaaagaaaatctttgtagcactttctgcaaagaggtggtgaggaatgctaacgaagaggaatattccatcggtagtagctccgaagaaagcgccgaggtagcaaccgaagaggtgaaaataactgttgatgataaacactaccagaaggcactcaatgaaataaaccaattctaccaaaagtttccccagtacctccagtacctgtatcagggtccaatcgtacttaacccttgggaccaagtgaaaagaaacgcagtgccaataacccccacactgaacagggagcaactcagtacaagcgaagagaattccaaaaagaccgtggacatggagtccactgaagtatttaccaaaaagactaagctcactgaggaagagaaaaataggctgaattttcttaaaaaaatatcccagcgctatcagaagtttgctctgccccagtatttgaagacagtatatcaacatcaaaaggcaatgaagccatggatacagcctaagacaaaggtgattccttatgtccgctacctt

SEQ ID NO: 232 - DNA, 666 bp, synthetic construct
  source 1..666: mol_type = other DNA
atgaaattctttatatttacttgccttctggccgtcgccttggcaaaaaatacaatggaacacgtcagtagctccgaagaaagtattatatctcaagaaacatacaagcaggagaaaaacatggcaataaatcccagtaaggaaaacctttgtagcacattctgtaaggaagtcgtcaggaatgctaatgaagaggagtattctatcgggtcttccagtgaagagtcagccgaagttgccactgaagaagttaagatcaccgtggatgataagcactatcaaaaagcacttaatgaaatcaatcagttctaccaaaaatttcctcaatacttgcagtacctgtatcaaggacctattgtgctcaatccctgggaccaagtgaagaggaatgctgtgcccataacacctacactcaatagggaacagctgagtacctccgaagaaaatagtaagaagacagtagacatggaatcaaccgaggtcttcacaaagaaaactaaactgacagaggaggaaaagaacagactcaattttcttaagaagatttcccagcgctatcaaaaattcgctcttcctcagtatctgaaaactgtctaccagcatcaaaaagctatgaaaccttggatacaacctaagactaaagtcatcccttacgtgcgttatctt

SEQ ID NO: 233 - DNA, 666 bp, synthetic construct
  source 1..666: mol_type = other DNA
atgaagttctttatcttcacctgtcttcttgcagttgccctggctaaaaatacaatggagcatgtttcatccagtgaagagagtattattagtcaagaaacatacaaacaggaaaagaacatggccattaacccatctaaagaaaacctttgtagtaccttctgtaaggaggttgtgagaaatgctaatgaggaagaatactcaatcggtagcagttcagaggaatcagccgaagttgccaccgaggaggttaagattacagtcgatgataaacactatcaaaaggctctgaatgagatcaatcaattctatcaaaaattcccccaatatttgcaatatctctatcaaggccccatagtgttgaacccttgggaccaagtcaagaggaacgctgtccccatcacaccaaccttgaaccgtgagcagttgtctacttcagaggaaaactctaaaaaaacagtggacatggaaagtaccgaggtatttacaaaaaaaacaaaactcacagaggaagaaaagaatcgtctgaacttcctgaagaaaatctcccaaagatatcaaaagttcgctttgcctcagtacctcaagactgtctatcaacaccagaaagccatgaagccctggatacaaccaaagaccaaggtgatcccctatgtgaggtatttg

SEQ ID NO: 234 - DNA, 666 bp, synthetic construct
  source 1..666: mol_type = other DNA
atgaaatttttcatattcacctgcttgttggctgtagcacttgctaaaaatacaatggagcacgtatcctcaagtgaagaatctataatctcccaggagacttataaacaggaaaaaaatatggctattaacccaagtaaagagaacctgtgttctacattctgtaaggaagtagtacgtaacgccaacgaggaggagtattctattggttcttcaagcgaagagtccgcagaggtagctacagaagaagtaaagatcactgttgatgacaagcactatcaaaaagcacttaatgaaataaaccagttctatcagaaatttcctcaatacctccagtatctgtatcaaggtcccatcgtgctcaacccctgggatcaagtgaaacgtaatgcagtgccaataacaccaaccctgaatcgtgaacaactgtcaacttccgaggaaaacagtaaaaagaccgtagatatggagtccactgaagtctttacaaagaagactaagttgacagaggaagaaaaaaaccgcttgaatttccttaaaaaaatttctcagagatatcagaaatttgccctgcctcagtaccttaagacagtatatcagcatcaaaaagctatgaaaccatggatacaaccaaagacaaaagtcatcccttacgtaagatacttg

SEQ ID NO: 235 - DNA, 666 bp, synthetic construct
  source 1..666: mol_type = other DNA
atgaaatttttcatttttacatgcctgctggcagtcgcactcgcaaagaacacaatggaacacgtctcctcttccgaggaaagtatcatcagccaagagacatacaagcaagagaaaaacatggccattaaccctagcaaggaaaatctttgttctaccttttgtaaggaagtggtccgtaatgccaatgaggaagaatatagcatagggagttctagcgaggaatctgcagaggttgcaacagaggaagttaagataacagtggatgataagcattatcagaaagccctcaacgagataaaccaattttatcaaaaatttccccagtatctccagtatctttatcaaggtcccattgttctcaacccatgggaccaggtaaagaggaacgcagttcctattacacctacacttaacagggagcagctctctacctccgaggaaaactctaagaaaactgtggatatggagagtacagaggtatttacaaagaaaacaaaacttacagaggaggaaaagaaccgtctgaattttctcaagaaaatatcccaaaggtaccagaaattcgctctgccccagtatttgaagactgtgtatcaacatcagaaagcaatgaagccctggatacaaccaaagactaaggtaattccctatgtaagatacctg

SEQ ID NO: 236 - DNA, 666 bp, synthetic construct
  source 1..666: mol_type = other DNA
atgaagttttttatctttacttgcctgcttgccgtcgctttggcaaagaacaccatggaacacgtatcaagttctgaggagtcaatcatctcacaagagacttataagcaagaaaagaacatggcaataaaccctagcaaggagaatttgtgttcaaccttttgtaaagaagtcgttcgtaatgccaacgaagaggagtactctattggtagtagtagtgaagagtctgccgaggtggctaccgaggaggttaagattacagtggacgataagcactatcagaaggcacttaacgagatcaaccaattctaccagaaattcccacaatatctgcaatatctgtaccaggggccaattgtcttgaacccttgggatcaggtgaagcgcaatgctgttcccataacacccactcttaatcgtgaacagcttagtacaagtgaggaaaacagcaaaaaaacagtggatatggagtctacagaagttttcacaaagaagaccaaattgacagaggaggagaagaatagactcaattttcttaaaaaaatttcacaaaggtatcagaaattcgctctgccccagtatttgaaaactgtttaccagcatcaaaaagccatgaagccatggattcagcccaagaccaaagttattccatacgtccgttatctt

SEQ ID NO: 237 - DNA, 666 bp, synthetic construct
  source 1..666: mol_type = other DNA
atgaaattcttcatttttacctgtttgcttgctgtagctctcgctaagaataccatggaacacgtctcatcatccgaggaaagcattataagccaggagacatacaagcaagaaaagaacatggctatcaacccttcaaaggagaacttgtgtagcacattctgcaaggaagtcgtgcgcaatgccaacgaggaagagtatagcattgggagcagcagtgaagagagcgctgaggttgctactgaagaagtcaaaataactgtagacgataaacactaccaaaaagcacttaacgagatcaatcagttctatcagaagtttccccaatacttgcagtatttgtaccaggggcctatagttttgaatccttgggaccaagtaaagcgcaatgcagttcctataaccccaacacttaatcgtgagcaactcagtaccagcgaagagaacagtaaaaagactgtggatatggagtctactgaggttttcactaaaaagactaaactcacagaagaagagaagaatcgtttgaactttctgaagaaaattagtcaacgctaccaaaaattcgctctgccacaatacttgaaaaccgtatatcagcatcagaaggcaatgaaaccctggatacagcctaagactaaggtaataccatacgttcgctatctt

SEQ ID NO: 238 - DNA, 666 bp, synthetic construct
  source 1..666: mol_type = other DNA
atgaaatttttcatattcacatgccttctggcagtagccttggctaaaaatactatggagcatgtctccagtagcgaggaatctattatatctcaagagacatacaaacaagagaaaaacatggcaataaacccctccaaggaaaatctgtgcagtactttctgtaaagaagtcgtaagaaacgctaacgaagaggaatattccataggctcaagttccgaagaaagtgccgaggtagcaacagaggaagttaagatcactgtggatgacaagcactaccagaaggctctgaacgaaatcaatcagttttatcagaaatttccccaatatctgcagtacctctaccaaggaccaatagtgttgaacccttgggaccaggttaaaagaaatgccgttcccatcaccccaactctgaacagggaacaactttctacttccgaggaaaatagcaagaagaccgtagatatggagtccaccgaggtatttaccaagaagaccaagcttacagaggaggaaaaaaatcgccttaactttctgaagaaaatttcccaacgctaccaaaaattcgctctgccccaatacctcaaaacagtataccaacaccagaaggcaatgaaaccatggatacagcctaaaacaaaagttataccttacgtgcgttatctt

SEQ ID NO: 239 - DNA, 666 bp, synthetic construct
  source 1..666: mol_type = other DNA
atgaagttcttcatttttacctgtttgttggcagtggccttggcaaagaataccatggagcacgtatcatccagtgaggaaagtatcatttcacaggagacttacaagcaggagaagaacatggctataaatcccagtaaagaaaatctgtgttccacattctgtaaggaagttgtacgtaacgccaacgaagaagaatacagtataggatcctccagtgaggagtcagctgaagtcgccaccgaagaggtcaagataacagtcgacgacaagcactaccaaaaagccctcaacgaaatcaaccaattttatcaaaaattcccacagtaccttcagtacctgtaccagggtcctattgttctgaatccctgggaccaggtaaagagaaatgccgtgcccataaccccaaccctcaatagggaacaactcagcacttcagaagagaattcaaaaaagacagtagacatggaatcaactgaagtatttacaaaaaagaccaagctcactgaagaggagaaaaacagactcaatttcctgaaaaaaattagccagcgttatcagaaatttgctttgccccaatacctcaaaaccgtataccaacatcaaaaagccatgaaaccatggatacaaccaaagacaaaagtgatcccatacgtgcgctatctt

SEQ ID NO: 240 - DNA, 666 bp, synthetic construct
  source 1..666: mol_type = other DNA
atgaagtttttcatattcacctgtctgctcgcagttgcacttgcaaaaaataccatggagcatgtaagttcaagtgaggagtccataatatctcaagaaacatataaacaagaaaagaacatggctatcaacccatccaaagaaaacctttgcagcacattctgtaaggaagttgttagaaacgctaacgaagaggagtacagcattggctcctcttccgaagagagcgcagaagtagctactgaagaggtcaagattactgtggacgacaagcattaccaaaaagcactcaatgagatcaaccagttttatcagaagtttcctcaatatctgcaatatctgtatcagggccctatagtgctgaatccttgggatcaagtgaagaggaatgctgtaccaattactcctactttgaaccgcgagcagctttccacctctgaggagaattcaaagaagacagtggacatggagagtaccgaggtttttacaaagaaaactaaacttacagaggaagaaaagaaccgtctgaatttcctgaagaagatttctcaacgctaccaaaaattcgccctcccacagtatctgaaaactgtttaccagcatcagaaggcaatgaaaccttggatacagccaaaaaccaaggtgataccctatgttagatacctt

SEQ ID NO: 241 - DNA, 666 bp, synthetic construct
  source 1..666: mol_type = other DNA
atgaaatttttcatattcacatgccttctcgcagtagcattggctaagaatactatggagcacgtaagttccagcgaggagagtataattagtcaggaaacttacaagcaagaaaaaaatatggctattaatccaagcaaagaaaatctttgcagcaccttctgtaaggaggtagttagaaacgccaatgaagaggagtactccataggctcaagctccgaagagtccgcagaagtagccactgaggaagtgaagataaccgttgacgacaaacattatcagaaagctctcaatgaaataaatcaattctaccagaaatttccacagtacctccagtacctttaccaaggtcccatcgttctgaacccatgggatcaggtaaaacgcaacgccgttcccattaccccaaccctgaatcgtgagcaactttctacctctgaggagaactccaaaaaaacagtggacatggagtccacagaagtctttaccaagaaaacaaaactcactgaagaagagaagaacaggctcaattttttgaagaagatttcacaacgctaccaaaagttcgcactcccacaatatcttaagacagtatatcaacatcaaaaagctatgaagccatggattcaacccaagactaaggtcatcccctacgtgcgctatttg

SEQ ID NO: 242 - DNA, 666 bp, synthetic construct
  source 1..666: mol_type = other DNA
atgaagtttttcatatttacttgtctgctcgcagtggctttggcaaagaatactatggaacacgtctcctccagtgaagaatcaattatctcacaggaaacttacaagcaagaaaaaaatatggccattaacccatctaaggagaacctttgctcaacattctgcaaagaggtcgttcgtaacgccaatgaagaagagtacagcatagggagcagttctgaggagtctgcagaggttgcaaccgaagaagtaaaaattacagtcgatgacaaacactatcaaaaggccttgaacgagataaatcaattttatcaaaagtttccccaatacttgcagtacctctaccaaggcccaatagttttgaatccatgggatcaagtcaaacgtaacgccgtccctattacaccaacattgaatagggagcagctttccacttctgaagagaatagtaagaaaaccgtggacatggagagcaccgaagtctttactaaaaaaaccaaactcactgaagaagaaaagaataggctcaattttctgaaaaagatttcacagcgttatcagaaattcgccctcccacaatatctgaaaacagtctaccaacaccaaaaagctatgaaaccatggatacagccaaaaactaaggttatcccctatgtacgctatctc

SEQ ID NO: 243 - DNA, 666 bp, synthetic construct
  source 1..666: mol_type = other DNA
atgaaattctttatttttacttgcctcctggctgttgcattggctaagaacacaatggagcatgttagttcttcagaagagtccattatatctcaagagacctataaacaagaaaagaacatggcaattaatccatctaaagaaaatttgtgtagcaccttttgtaaggaagtggtccgtaatgccaacgaagaggagtatagcattggttcttcttcagaggagagcgctgaagtcgctaccgaagaagtcaagattacagtggacgataaacactaccagaaggctctcaatgagattaaccagttttatcaaaagttcccccagtatcttcaatacctctaccagggccctatagtcctgaacccttgggaccaagtgaaacgtaacgcagttccaatcactcccacccttaacagagagcagctctccaccagtgaagaaaactccaagaaaacagttgatatggagtccacagaggtcttcacaaagaaaactaaattgactgaggaggagaaaaatcgcttgaatttccttaaaaagattagtcaaagataccagaagtttgctttgccacagtacctcaaaactgtctaccagcatcagaaagctatgaaaccttggattcagcccaaaactaaggtgatcccttatgtaagatatttg

SEQ ID NO: 244 - DNA, 666 bp, synthetic construct
  source 1..666: mol_type = other DNA
atgaaattttttattttcacatgcctgcttgctgtcgccctggcaaaaaatactatggagcacgtcagctccagcgaagagagcatcatttctcaggagacctataaacaagaaaaaaacatggccataaatccttcaaaggagaatctctgctcaaccttctgcaaagaagtcgtgagaaatgcaaacgaggaggaatatagcatagggtccagctccgaagagagcgcagaggtggccaccgaggaagtcaagataactgtcgatgataaacactaccagaaggcattgaatgaaataaatcagttttaccaaaaattcccccaataccttcaatatctctatcaaggacccattgttcttaatccatgggatcaagtaaaacgtaacgcagtgcctattacacctaccctgaacagggagcaattgagtacatccgaagaaaactctaagaagaccgtggacatggagagcacagaagtttttactaagaaaaccaagctgactgaagaagaaaagaacagactgaacttcctgaaaaaaatctcacagaggtatcaaaaatttgccttgcctcaatacttgaaaactgtataccagcatcaaaaggcaatgaagccttggattcagcccaagactaaggttatcccctatgttcgttatctt

SEQ ID NO: 245 - DNA, 666 bp, synthetic construct
  source 1..666: mol_type = other DNA
atgaagttttttatctttacttgtcttttggcagttgccttggcaaaaaacacaatggagcacgtaagcagttctgaagagtcaatcataagccaagagacatataaacaagaaaaaaatatggccataaacccatccaaagagaacctttgctcaacattctgtaaggaggtggtgaggaatgccaacgaagaagaatattcaattggatcaagtagtgaggagagcgctgaggtggcaacagaagaagtgaaaatcaccgtcgatgacaaacattaccagaaggcccttaacgagataaatcaattctaccaaaagttcccccaatatttgcagtacctgtaccaaggcccaattgtactcaacccttgggatcaagtaaagaggaacgccgtgccaatcacaccaacactcaatcgtgagcagctcagcacatcagaagaaaactctaagaagacagtcgatatggaatcaacagaggtgttcacaaagaagaccaagctcactgaagaggagaagaaccgcctcaattttctgaaaaaaatatcacaacgttatcaaaaatttgctcttcctcaatatttgaagacagtctaccagcatcagaaagcaatgaagccttggatacagcctaaaactaaagttatcccatatgtgcgctacttg

SEQ ID NO: 246 - DNA, 666 bp, synthetic construct
  source 1..666: mol_type = other DNA
atgaagtttttcatattcacatgcttgttggcagttgctctcgcaaaaaacactatggagcacgtctcaagtagcgaagagagcattattagccaagagacatacaaacaagagaaaaacatggcaataaaccccagtaaagagaacctgtgcagcactttttgcaaggaagtcgtaaggaatgcaaacgaagaagaatatagcatagggtcaagcagtgaggaatcagcagaggtagctacagaggaagttaagattactgtcgacgacaaacactaccaaaaagccctcaacgaaatcaatcaattctaccagaaatttccacagtatctccagtacctctaccaaggaccaatagtgcttaacccttgggatcaggttaagagaaatgcagtacctattaccccaactttgaaccgtgagcagctctcaaccagcgaggaaaactcaaaaaagaccgttgacatggagagtacagaggtattcactaagaaaaccaagctcaccgaagaagagaaaaataggttgaacttcttgaagaagataagtcagcgctatcagaagttcgctctcccacagtacctgaagacagtttatcaacaccaaaaggcaatgaaaccatggatccaacccaaaactaaggtcataccttatgtccgttacctt

SEQ ID NO: 247 - DNA, 666 bp, synthetic construct
  source 1..666: mol_type = other DNA
atgaaattcttcatatttacttgcctcctggccgtcgccctggctaaaaataccatggagcacgtcagctcttccgaggaaagcataatttcccaagagacttacaaacaagaaaaaaatatggccatcaatccctccaaggagaatttgtgctccaccttctgcaaagaggtcgttagaaacgctaacgaggaagagtacagtattggctcatctagcgaggaatctgctgaggttgccacagaagaggtcaagataacagtagatgataaacactatcagaaggcacttaacgagatcaaccaattctaccaaaaattcccacaatacttgcaatatctttatcagggccctatcgtgcttaatccttgggaccaagttaagaggaacgccgtccccataactcctaccctgaatagggaacaattgagtaccagtgaagagaattccaaaaaaacagtggatatggaatcaaccgaggtatttaccaaaaaaaccaagctcaccgaagaggagaaaaacagacttaacttcttgaagaagatttctcagcgctatcaaaaattcgcccttccacaatacctcaaaactgtctaccagcaccagaaagccatgaagccctggattcaacccaaaaccaaagtcatcccttatgtacgttacttg

SEQ ID NO: 248 - DNA, 666 bp, synthetic construct
  source 1..666: mol_type = other DNA
atgaagttttttatttttacttgtctcttggctgtagctctggccaaaaacacaatggagcacgtatcatccagcgaggagtctattatatcccaagagacttataaacaggaaaaaaatatggccataaaccctagcaaggaaaacttgtgctctacattctgtaaggaggtagttcgtaatgctaatgaggaggagtattctatcggatcttcatccgaggaaagtgctgaggtggctactgaggaagtcaagatcaccgtcgatgacaaacattatcaaaaagcactcaatgagattaaccaattctaccaaaagtttccacagtatcttcagtatctttatcagggaccaatcgtgcttaatccttgggatcaggttaagagaaacgctgttcctattactcctaccctgaatcgcgagcaactgagtaccagcgaggaaaattctaagaaaaccgtggatatggaaagcactgaagtgtttacaaagaagaccaaacttaccgaagaagaaaagaacaggctgaactttctgaaaaagataagccagaggtatcaaaaatttgctctgccccagtatctcaaaacagtctatcagcaccagaaagctatgaagccctggattcaaccaaaaactaaagtaatcccatacgtaaggtacttg

SEQ ID NO: 249 - DNA, 666 bp, synthetic construct
  source 1..666: mol_type = other DNA
atgaagttcttcatatttacatgccttcttgctgttgcattggctaagaatacaatggagcacgtttctagttccgaggaatcaattatctctcaggaaacctacaagcaggagaagaatatggcaatcaatcccagcaaggagaatctttgttccacattttgcaaggaggtagttcgcaatgctaacgaagaagaatactccataggctcatcatccgaggaaagtgcagaggtagccacagaagaggtaaagatcactgttgatgacaaacactaccaaaaggcactgaacgaaatcaaccagttttaccagaagttcccccagtatctccaatacttgtatcagggtccaattgtgctgaacccttgggatcaggtcaagaggaacgccgtccctatcaccccaactcttaatagagagcaacttagcacttcagaggaaaactccaagaagaccgttgacatggagagcaccgaagtgttcacaaagaagaccaagctcacagaggaggaaaagaatcgtttgaactttcttaaaaaaatctcccagcgttaccagaagttcgccctgcctcaatacctgaaaaccgtttatcaacatcaaaaagctatgaaaccctggattcaacctaagaccaaagttataccttacgtgcgctacctg

SEQ ID NO: 250 - DNA, 666 bp, synthetic construct
  source 1..666: mol_type = other DNA
atgaaatttttcattttcacatgcctcctggctgttgcacttgcaaagaacacaatggaacatgtgagttctagcgaggagtccatcataagccaggagacctacaagcaagagaagaatatggcaatcaacccatccaaggagaacttgtgtagcacattctgcaaggaggtagtacgtaatgccaatgaggaggagtattccatcggaagcagcagcgaggaaagtgccgaggtcgcaacagaggaggttaaaattaccgttgatgacaagcattaccagaaggctctgaacgagataaatcagttctaccaaaagttcccccagtacctccaatatttgtatcagggacctattgtactcaatccttgggaccaggttaagcgcaatgccgtccctataactcccacccttaacagagaacaactctcaacttcagaagaaaactcaaaaaaaaccgttgatatggaaagcaccgaggtgttcaccaagaagaccaagttgactgaagaggaaaaaaaccgcttgaacttcctcaagaagatatcccaaaggtatcagaaattcgctctccctcaatatctgaagactgtgtatcaacatcagaaggcaatgaaaccttggattcagccaaaaactaaagtgatcccttacgtacgctacctt

SEQ ID NO: 251 - DNA, 666 bp, synthetic construct
  source 1..666: mol_type = other DNA
atgaaattttttatctttacttgcctcttggcagtcgctcttgcaaaaaacacaatggaacacgtctcaagtagcgaagaatcaataattagccaagagacttacaagcaggaaaagaacatggccatcaatcctagtaaagaaaatctttgctcaaccttctgtaaggaggtagttcgcaatgccaacgaagaagaatactctatcggtagctcatccgaggagagtgctgaagtggctacagaggaagtaaagatcaccgtagacgataaacactatcaaaaagcacttaatgagattaaccagttttatcaaaagttcccccaataccttcagtacctttatcaggggcccattgtattgaatccttgggaccaggttaagaggaatgcagttccaattacacccacactgaaccgcgagcagctctcaacaagcgaagaaaacagcaaaaagactgtagacatggagtctactgaagtgttcacaaagaagaccaagttgacagaggaagagaagaataggttgaacttcctcaaaaaaatttcccaaaggtatcaaaaatttgcccttcctcagtatctcaagacagtctaccaacaccagaaagctatgaaaccttggatccagcctaaaacaaaggtaattccttacgtcagatacctc

SEQ ID NO: 252 - DNA, 666 bp, synthetic construct
  source 1..666: mol_type = other DNA
atgaagttctttatcttcacatgtctgcttgcagtagctcttgcaaaaaatactatggagcacgtaagttcctctgaggagagtataataagtcaggaaacctacaagcaggagaaaaacatggctatcaatccctcaaaggagaacttgtgttctactttttgcaaggaggtggtacgcaatgccaatgaggaagagtactcaattggaagctcctctgaagaatccgctgaggtcgccacagaggaggtcaaaataacagtagatgacaaacactaccagaaggcactgaacgagataaaccagttttaccaaaaattccctcagtatctgcagtacctttatcaaggacccatcgtcttgaacccttgggatcaagtcaagcgcaacgccgtacctataactcccacactgaatcgtgagcaactgagcacatctgaggagaacagcaaaaaaactgtagacatggaaagtaccgaggttttcacaaagaagactaaactgaccgaagaagaaaaaaaccgcctgaattttcttaaaaagatttcccagaggtaccagaagtttgcactcccccaatatctcaagactgtatatcagcaccaaaaagctatgaaaccttggattcagccaaaaacaaaagtcattccttatgtcaggtatttg

SEQ ID NO: 253 - DNA, 666 bp, synthetic construct
  source 1..666: mol_type = other DNA
atgaaattttttatctttacttgtttgcttgccgtagccctggctaagaacaccatggagcacgtttcctcctctgaagagtccatcatatcacaagaaacctataagcaagaaaagaatatggctatcaatccctcaaaggaaaatctttgcagcactttttgtaaggaagtcgttaggaatgccaacgaggaggagtacagcatagggagtagttccgaggaaagcgccgaagtcgccaccgaagaggtgaaaatcaccgtcgacgacaaacactaccaaaaagcattgaacgagataaaccaattctatcaaaagtttcctcaatatttgcaatacttgtatcaagggcctatcgtgcttaatccttgggatcaggtaaaacgcaacgcagttccaataacaccaacattgaatcgcgaacagctcagtacaagtgaagagaacagtaaaaagactgttgacatggaaagtacagaggttttcactaagaaaacaaaactgactgaagaggaaaagaacaggttgaactttctcaaaaaaatcagccaaaggtaccagaagtttgctcttccccaatatctgaagactgtgtatcaacaccaaaaggcaatgaagccctggatacaaccaaaaactaaagttataccctacgtccgctacctc

SEQ ID NO: 254 - DNA, 666 bp, synthetic construct
  source 1..666: mol_type = other DNA
atgaagttctttatttttacttgcctcttggctgttgcccttgcaaagaacactatggaacacgtgtcctccagcgaggagagcatcatttctcaggagacatacaagcaagaaaaaaatatggccattaatccttccaaggagaatctgtgctctacattttgtaaggaggttgttaggaatgcaaacgaagaagagtattccatcggttctagctccgaagagtctgctgaagtggcaacagaagaggtaaaaattactgtcgatgataagcattaccagaaggcactgaacgagatcaatcagttttaccagaaattcccacaataccttcaatacctctaccagggccctatcgttctcaacccctgggaccaggtaaaaagaaatgctgtgccaattactcctacactgaacagagaacaactttccacttctgaggaaaactctaaaaaaactgtagacatggagagcaccgaagtattcacaaagaaaaccaaactcacagaggaggagaagaaccgtcttaactttcttaaaaagatcagccagcgttatcaaaaatttgccttgccacaataccttaaaaccgtttaccaacatcagaaagctatgaaaccatggattcagcccaagaccaaagtaatcccctacgtcaggtacttg

SEQ ID NO: 255 - DNA, 666 bp, synthetic construct
  source 1..666: mol_type = other DNA
atgaaattttttatcttcacctgcctgctggctgttgctctggccaaaaacactatggaacatgtttcatcctctgaggaatcaataatcagtcaagagacctataagcaggaaaaaaatatggccatcaaccccagtaaggagaatctttgttctaccttctgtaaggaagtcgttcgtaatgcaaatgaagaagagtattctatcggcagcagctccgaagaatccgccgaggtcgcaacagaggaagtcaagatcacagtagacgataagcactaccaaaaggcactcaatgagataaatcaattctaccaaaagttcccacaatacctccagtacctgtatcaaggtccaattgtcctcaatccttgggatcaggttaagaggaatgccgtccccataactcctaccttgaaccgcgaacaactctctacatccgaagagaacagtaaaaagaccgttgatatggagtccactgaagtgtttactaagaaaaccaaacttaccgaagaggagaaaaataggctcaactttctgaaaaaaattagtcagagataccagaaattcgctttgccacaatatctcaagaccgtttatcagcaccagaaggcaatgaagccatggatacagcctaaaacaaaggttattccttacgtgaggtatctt

SEQ ID NO: 256 - DNA, 666 bp, synthetic construct
  source 1..666: mol_type = other DNA
atgaaattcttcatctttacttgtttgcttgctgttgcccttgccaagaatactatggagcatgtaagcagtagtgaggagtcaatcatatcacaagaaacctacaagcaagagaaaaatatggcaatcaaccccagtaaagaaaacctgtgctccacattttgtaaggaggttgtgcgtaacgccaacgaagaggaatactctatcggcagtagttccgaagaaagtgcagaagtagccactgaagaggtcaagataacagttgatgacaagcattatcaaaaagcactcaacgagatcaaccagttctatcaaaagtttccacaatacctgcagtatttgtatcaaggtcctatcgttctcaacccctgggatcaagtgaagaggaacgctgtccccatcactcctacattgaatagagagcaactcagtaccagcgaagaaaactccaagaagacagtggacatggaatctaccgaggtattcactaaaaagactaaactgactgaagaggagaaaaatcgtctcaactttcttaagaagattagccagcgttatcaaaagtttgcccttccacagtaccttaagaccgtttatcagcaccaaaaagctatgaagccatggatacaaccaaaaaccaaagtaatcccctatgttaggtatctc

SEQ ID NO: 257 - DNA, 666 bp, synthetic construct
  source 1..666: mol_type = other DNA
atgaagtttttcattttcacatgcctgcttgccgtagccctggctaaaaacacaatggagcacgtctccagcagtgaagaatccataatctcccaagagacatacaagcaggaaaaaaatatggccataaacccttccaaagaaaacctgtgctctacattctgcaaagaggtggtaagaaacgccaatgaagaggagtattctattgggtcctccagcgaagaaagcgcagaggtagctactgaagaggtaaaaatcaccgtggatgataaacattatcagaaggcactcaatgaaatcaaccagttttatcaaaagtttccacaatacctgcagtacctgtaccagggtcctatagttctcaacccttgggatcaagttaagcgtaacgctgttcccattacaccaaccttgaatagagaacagctttccactagcgaggagaacagtaagaagacagttgatatggagtctaccgaagtgtttaccaagaagaccaaattgactgaggaggaaaaaaaccgccttaacttcctgaagaaaatttcacagcgctaccagaaatttgccctgccccaatatctgaagaccgtatatcaacatcaaaaagctatgaagccatggattcaacctaaaactaaagtgattccctacgtgaggtatctt

SEQ ID NO: 258 - DNA, 666 bp, synthetic construct
  source 1..666: mol_type = other DNA
atgaaattttttattttcacttgtctcttggccgttgccctggccaagaatactatggagcatgtgtcatcctcagaggagagtattatatcccaggaaacatataaacaggaaaagaacatggccataaacccctctaaagaaaatctttgtagtacattttgtaaggaagtcgttaggaacgcaaatgaggaggagtactccatcggaagttctagcgaggagtcagcagaggtagctaccgaagaggtaaaaataactgtagatgacaagcattaccagaaagccctgaatgagataaatcaattctatcaaaaattcccccagtacctgcaatacctgtaccaagggcctattgttctgaatccttgggaccaggttaaacgcaatgcagtgcctattacccccacactcaaccgcgagcaactttccacttctgaagaaaattccaaaaaaaccgtggacatggaatccacagaggtctttactaaaaagacaaagctcactgaggaggaaaagaataggctcaacttcttgaaaaagatttcccaaagataccaaaaatttgccctccctcaataccttaaaactgtctaccagcaccagaaggcaatgaaaccatggattcaacctaagactaaagtgatcccatacgtgcgctacctc

SEQ ID NO: 259 - DNA, 666 bp, synthetic construct
  source 1..666: mol_type = other DNA
atgaagttctttatcttcacctgtctccttgctgtagctcttgctaagaacactatggaacatgtgtctagttccgaggaatcaattatatcccaggaaacatataaacaagagaagaacatggctataaacccttcaaaggagaatttgtgttcaacattttgcaaggaagtggtgcgtaacgccaatgaggaggagtacagcattggcagttcaagcgaggagagcgcagaggtcgctacagaggaggtcaaaattactgtagatgacaagcattatcagaaagctctgaatgagatcaaccagttctaccagaagtttccccagtatctccagtacctttatcaagggcccatagtgctcaacccatgggatcaggttaagcgcaatgctgttcccattacacccactttgaaccgtgagcaactttccactagtgaagagaacagtaagaagacagtggacatggaatccacagaagtatttactaagaaaacaaaactcacagaagaagagaaaaatcgtctcaacttcctcaaaaagatttcccaaagataccagaagtttgctctgccacagtacctcaaaactgtttatcagcaccagaaggcaatgaaaccttggatacaacccaagaccaaagtcataccctacgttagatacctc

SEQ ID NO: 260 - DNA, 666 bp, synthetic construct
  source 1..666: mol_type = other DNA
atgaaattttttatctttacttgtcttttggctgtagcccttgccaagaatactatggaacacgttagctctagtgaggaaagtatcattagtcaggaaacctacaagcaagagaaaaatatggctatcaatcccagcaaggaaaatctgtgctccacattctgcaaagaggtggtccgcaacgctaacgaagaggagtacagcatcgggagttcatcagaagagagtgcagaggttgccacagaagaggtcaagattactgtggatgacaagcactatcagaaagccctcaacgaaattaatcaattctatcaaaaatttcctcagtacttgcaatatctctatcaaggccccatagtgctcaatccctgggatcaggttaagcgtaacgctgtaccaattacacctacattgaaccgtgaacagttgtctacatcagaggagaactctaagaaaaccgtagatatggaatcaaccgaagtgttcacaaagaaaacaaaactgactgaagaggaaaagaataggctcaacttcctgaagaagatcagtcagaggtaccaaaagttcgctcttccacagtacttgaagacagtgtatcaacaccagaaggcaatgaagccttggatacagcccaagacaaaagtaataccctacgtcagatatttg

SEQ ID NO: 261 - DNA, 666 bp, synthetic construct
  source 1..666: mol_type = other DNA
atgaaattcttcatctttacctgcctcttggctgttgcacttgctaaaaacaccatggaacatgtgagttctagcgaggagagcataatttctcaagaaacctataagcaagagaaaaatatggccattaaccccagcaaggagaatttgtgctcaactttctgcaaggaggtggtacgcaacgccaatgaagaagagtattccatagggtctagctctgaagaatccgcagaggtggctacagaagaggtgaagataactgtggatgacaagcactaccagaaggccctcaacgaaattaaccagttctatcaaaaatttccccaatatcttcagtatctgtatcaaggaccaatagtgctcaacccatgggaccaagtaaagcgcaatgccgtcccaatcactccaactttgaatcgtgagcaacttagtacatcagaggaaaactctaaaaagaccgttgacatggaatccaccgaggtattcactaagaaaacaaagctcacagaggaagagaagaatcgtttgaacttcctcaagaagataagtcagcgttaccagaagttcgctcttccccagtatctcaaaaccgtttaccaacaccaaaaagcaatgaagccctggatccaaccaaagaccaaagtcattccttatgtcagatacctg

SEQ ID NO: 262 - DNA, 666 bp, synthetic construct
  source 1..666: mol_type = other DNA
atgaaattcttcatttttacctgtctcctggctgttgcccttgcaaaaaacacaatggagcacgtcagcagtagtgaggaatctatcatcagccaggaaacttacaagcaagaaaagaacatggcaatcaacccaagtaaagaaaatctctgtagcactttttgtaaagaagttgttcgtaatgccaacgaagaggagtacagtattggaagttcctcagaggagtcagctgaagtggctacagaggaggtaaagataacagttgacgataagcattatcagaaagctctcaatgagatcaatcaattctatcagaaattcccacagtatttgcagtacctttaccaaggacctattgttttgaacccctgggaccaggtgaaacgcaacgcagtacctataaccccaactttgaatagagaacagctcagcacctcagaagaaaactccaagaaaactgtagatatggaaagcactgaagtgttcaccaaaaagacaaaacttactgaggaagagaagaaccgtctcaatttcttgaaaaagatttctcagaggtaccagaaatttgcactgcctcaatacctgaagaccgtctatcaacaccaaaaagctatgaaaccatggattcagccaaaaacaaaagtcattccctatgtccgttacctg

SEQ ID NO: 263 - DNA, 666 bp, synthetic construct
  source 1..666: mol_type = other DNA
atgaaattttttattttcacttgtttgcttgcagtagctttggcaaaaaataccatggagcatgtgtcaagtagcgaggagagcatcattagtcaggaaacttacaaacaggagaaaaatatggcaatcaaccctagcaaggagaatctttgttcaaccttctgtaaggaagtcgtgcgtaatgcaaacgaagaagagtactctataggcagctcatcagaggaatccgccgaagtcgccactgaagaggtgaaaatcaccgttgacgataaacattatcaaaaggctctcaatgagattaatcaattctaccaaaagttccctcagtacttgcagtacttgtatcaggggccaatcgtactgaacccttgggatcaggtaaagaggaacgccgtccccatcacccctactctgaatcgtgagcagctttcaaccagcgaagagaactctaagaagactgtagatatggaatcaacagaggtgttcaccaagaaaaccaaactcaccgaagaggagaagaacagacttaatttcctcaagaagataagtcaacgttaccagaagtttgctcttccccagtacttgaagaccgtttaccagcatcagaaggcaatgaagccttggatccaacccaagacaaaggtgatcccctacgtcaggtatctc

SEQ ID NO: 264 - DNA, 666 bp, synthetic construct
  source 1..666: mol_type = other DNA
atgaagttctttattttcacatgcctcttggctgtagcactcgcaaagaatactatggagcacgtctccagctctgaagaaagtataattagtcaggagacctataagcaggaaaagaacatggctataaaccctagcaaggagaacctttgtagtactttttgcaaggaggtagttagaaatgcaaacgaagaggaatattccattggatcaagttctgaagagagtgccgaggtcgctaccgaagaggtaaagataaccgtcgatgacaagcactatcaaaaggcattgaatgaaataaaccagttctaccagaagttcccccaatacctccaatatctttatcaagggcccattgtcttgaacccttgggaccaagtcaaaagaaacgctgtgcctataactcccaccttgaaccgcgaacaactttccacttcagaggaaaactcaaaaaaaacagtcgatatggagtccaccgaagtattcacaaaaaaaacaaaattgaccgaggaagagaaaaataggttgaatttccttaagaaaatctcacagagataccagaaatttgccctgcctcaataccttaaaacagtgtaccagcatcaaaaggctatgaagccatggattcaacctaagacaaaggtcattccatacgtccgctacctt

SEQ ID NO: 265 - DNA, 666 bp, synthetic construct
  source 1..666: mol_type = other DNA
atgaaattctttatatttacctgcttgctcgcagttgccctcgccaaaaatactatggagcatgtttcctccagtgaggaaagcatcattagccaagagacctataaacaagagaaaaatatggcaattaaccccagcaaggaaaatctttgcagcacattctgcaaggaagtcgtcagaaacgctaatgaagaggaatactctattggaagtagttctgaggaaagcgccgaggtcgccacagaagaagtgaagattactgttgacgataaacactaccagaaggctcttaatgagataaatcaattctatcaaaagttcccacagtatttgcaatacctgtaccaggggcctatagtacttaacccatgggaccaagtcaagaggaacgcagtccctattacacctacacttaacagagaacaactcagtacatcagaggaaaatagtaagaagacagtagacatggagagtaccgaagtctttacaaaaaaaaccaagctgacagaagaagagaagaacaggctcaacttcctcaagaagatctcccagaggtatcaaaagtttgcattgccccaatacttgaagactgtatatcagcatcagaaagcaatgaaaccttggatccagcccaagaccaaggtaattccctacgtgagatacctt

SEQ ID NO: 266 - DNA, 666 bp, synthetic construct
  source 1..666: mol_type = other DNA
atgaaattctttatattcacttgtttgttggcagttgcacttgcaaaaaatactatggagcacgtctcctcctctgaggagagcataatcagccaagaaacatacaaacaagagaagaacatggccatcaatccaagtaaagaaaacttgtgttccaccttctgtaaggaagtggttaggaacgctaatgaggaggagtacagtattgggagttcaagcgaggagtctgccgaagtagctactgaggaagtcaagatcacagtagacgataagcactaccaaaaggcactcaacgagatcaatcagttctatcagaaattccctcagtacctccaatacctgtatcagggaccaatagttctcaacccttgggaccaggtcaaacgcaatgcagttcctatcactcctacccttaacagggagcaactttccacctctgaagagaactctaagaaaaccgtcgacatggagtcaacagaggttttcactaaaaagacaaaacttacagaagaagaaaaaaatcgtcttaacttcctgaagaagattagccagcgttaccaaaaatttgctctcccacagtatttgaaaactgtctatcaacatcaaaaggccatgaagccttggattcagccaaaaacaaaagtgattccctacgtacgctatttg

SEQ ID NO: 267 - DNA, 666 bp, synthetic construct
  source 1..666: mol_type = other DNA
atgaagttcttcatttttacttgtctcctggccgttgctctggcaaaaaatactatggagcacgtgtcatcatcagaagaatccattatcagccaagaaacatataagcaagagaagaacatggctatcaacccctctaaggaaaacctctgttccaccttttgcaaggaagtcgttagaaatgccaacgaagaagagtacagtatcggttcctccagcgaagagagtgccgaagtggctaccgaggaggtcaagatcaccgttgacgataagcactatcaaaaagctcttaatgagatcaatcagttctaccaaaaattcccacaatacttgcagtatctgtatcagggtcctatagtgctgaacccctgggatcaggttaaacgtaacgcagtgccaataactcctacccttaaccgcgagcaactgtctacctccgaggagaacagcaaaaaaaccgtggacatggagagcactgaagtcttcactaaaaagactaagttgaccgaagaggaaaaaaaccgtctcaacttccttaaaaagatcagccagagataccagaagtttgcattgccccagtatttgaagactgtttaccagcatcaaaaagccatgaagccatggatacagccaaaaaccaaagtgataccctatgtccgttatctt

SEQ ID NO: 268 - DNA, 666 bp, synthetic construct
  source 1..666: mol_type = other DNA
atgaaattcttcatcttcacctgtctgctcgctgtggcattggccaaaaacactatggaacacgtaagcagtagtgaggagagtataatatcccaggagacctacaaacaagagaaaaatatggctataaaccccagcaaagagaatttgtgctcaactttctgtaaagaggtagtacgcaatgccaatgaagaagaatactccatcggaagcagttcagaggagagtgctgaagtagccaccgaagaggtgaagattacagtcgacgataaacattatcaaaaggcactcaacgagattaaccaattttatcagaagttcccacaatacctccagtacctgtaccagggtcccattgttctgaatccctgggatcaggtcaagcgcaatgccgtgcctataaccccaaccttgaacagagaacaactcagtacaagcgaagaaaattctaaaaaaacagtcgatatggaatctaccgaggtgttcaccaaaaaaactaaacttaccgaagaagagaagaatagactgaactttctcaagaagatcagccagaggtatcagaaatttgcacttccacagtacctcaagacagtttatcaacatcaaaaggccatgaagccatggatccagcctaagacaaaagtcataccctatgttaggtatctg

SEQ ID NO: 269 - DNA, 666 bp, synthetic construct
  source 1..666: mol_type = other DNA
atgaagttttttatttttacctgtcttctcgccgtcgccctcgcaaagaacactatggaacacgtgtcatctagcgaagagtctatcattagccaagagacatataaacaagagaaaaacatggctattaatccaagtaaggagaatttgtgcagcacattctgtaaagaagttgttagaaacgcaaacgaggaggagtattccattggtagcagttctgaggaaagtgctgaggtggctactgaagaagttaaaataacagtagatgacaaacattaccagaaggcccttaatgagataaaccagttctaccaaaaattcccccagtatttgcaatacctgtaccagggtcccatcgtattgaatccttgggatcaggttaagcgcaatgcagttcctatcacaccaacattgaaccgtgaacagttgagcactagtgaagagaactccaagaagaccgtagacatggagtctactgaggtatttaccaagaaaactaaacttactgaggaagagaagaaccgtctcaactttcttaaaaaaatctcacaacgctatcaaaagttcgctctgccacaatatctcaaaaccgtttaccaacaccaaaaggcaatgaaaccttggattcagcccaagaccaaggttatcccttatgtgcgttacttg

SEQ ID NO: 270 - DNA, 666 bp, synthetic construct
  source 1..666: mol_type = other DNA
atgaagttctttatatttacttgcctccttgccgttgccctggcaaaaaacactatggagcacgtcagttcctcagaggaaagcattatatctcaagagacctataagcaggagaaaaatatggccattaatccaagcaaagaaaatctttgctcaaccttctgtaaggaggtggttcgcaatgcaaatgaggaggagtattctatcggtagtagctctgaagaatctgcagaagtagcaactgaagaggttaaaataacagtagacgacaaacattaccagaaggccttgaatgaaataaaccagttctatcaaaaatttccacagtaccttcaatacctgtaccaaggccctattgttcttaatccatgggaccaagtgaagagaaacgccgtgcccattaccccaacactcaaccgcgagcagttgagtacctccgaggagaattctaagaagactgtggacatggaatctacagaagtctttacaaaaaagacaaagttgactgaagaggaaaagaataggttgaacttcctcaagaagataagccaaaggtatcaaaaatttgctttgcctcaatacttgaagactgtctaccaacatcaaaaagctatgaaaccctggatacaacccaagacaaaggtaataccttacgtgcgttatctc

SEQ ID NO: 271 - DNA, 666 bp, synthetic construct
  source 1..666: mol_type = other DNA
atgaagttctttatcttcacatgcctgttggccgtggccttggccaaaaacactatggaacacgtcagttcttcagaggaatcaattatctcccaagaaacatacaaacaggaaaagaatatggccattaatcccagtaaagaaaacttgtgtagtaccttctgcaaggaggtagtacgcaatgctaacgaagaagaatactccatcggatcttccagtgaagagagcgcagaagtggcaaccgaggaggtcaagatcacagtcgacgacaaacactatcaaaaagctcttaacgaaattaaccaattctaccaaaaattcccacaatacctgcaatacctttatcaaggccctattgtgctgaatccatgggatcaagtaaagaggaacgccgtccctattaccccaaccctgaatcgtgagcaactctctacatccgaggaaaattccaagaaaacagtagatatggagtctacagaggtcttcaccaagaagactaagctcacagaagaagagaaaaaccgtctgaatttcttgaaaaaaatatctcaaagataccaaaagttcgctcttccccaatatctgaagactgtttatcaacatcaaaaagccatgaaaccttggattcaacctaaaaccaaagtgataccatacgtgaggtatctt

SEQ ID NO: 272 - DNA, 666 bp, synthetic construct
  source 1..666: mol_type = other DNA
atgaaattttttatctttacctgtctcttggctgtggctttggcaaaaaacaccatggagcacgtttcctcctctgaagaaagcatcatctcccaagaaacctataaacaagaaaagaacatggctatcaacccctcaaaagagaacttgtgttccaccttttgtaaagaagtcgttcgcaacgccaacgaagaggagtactccatcggttcctctagtgaggaaagtgcagaggtcgccacagaagaagtgaagataacagtggatgataaacactatcaaaaagcacttaatgagattaatcaattctatcagaagttccctcaataccttcaatacctctatcaggggccaatcgtacttaacccttgggaccaggttaagcgtaacgcagttcctatcactcctacactcaatagggaacaactttccacatcagaggagaattctaaaaaaaccgtagacatggaatccacagaagtattcacaaaaaagaccaagttgactgaagaagaaaagaatcgcctgaatttcctcaaaaaaatctcacagcgctaccaaaagttcgcactgcctcaatatttgaaaactgtctatcagcatcagaaggccatgaagccatggatacaaccaaaaaccaaagtcatcccttacgtccgttacctc

SEQ ID NO: 273 - DNA, 666 bp, synthetic construct
  source 1..666: mol_type = other DNA
atgaagttctttattttcacttgcctgctcgcagtcgctctcgccaagaatactatggaacacgttagttcatctgaggaatccattattagccaggagacctataagcaagagaagaatatggcaatcaaccctagcaaagaaaacctttgttctactttctgcaaagaggtcgttaggaatgcaaacgaggaggaatactcaattgggtctagcagcgaagagtcagcagaggttgctaccgaagaggttaaaataacagtggatgacaagcactaccagaaagccctgaacgagattaatcagttctatcaaaaatttccccagtaccttcagtacctgtaccaaggcccaattgttctcaatccttgggaccaagtgaagcgtaacgcagttcctataactcccacactgaatagagagcagctctccacatccgaagagaatagtaagaagacagtcgacatggagtcaacagaggtgtttactaaaaagactaaactcaccgaggaggagaagaatcgtcttaacttccttaagaagatcagccaacgctaccagaagtttgctttgcctcaatatctgaagacagtctatcaacaccaaaaagcaatgaagccttggattcagcctaaaactaaggtgataccttacgttagatatttg

SEQ ID NO: 274 - DNA, 666 bp, synthetic construct
  source 1..666: mol_type = other DNA
atgaagtttttcatttttacatgcctccttgccgttgcacttgctaagaatactatggagcacgtatcaagttctgaagagagcatcatctctcaagaaacctataagcaggaaaagaacatggccataaatccaagtaaggagaatctgtgttctaccttttgtaaagaggtcgtcagaaatgccaatgaagaagagtacagtataggaagttctagcgaagagtctgccgaagtggctaccgaagaggtcaagataactgtagacgacaagcattaccagaaagcactcaacgaaataaatcagttctatcaaaagtttccccagtatctgcagtatctttatcaaggaccaatcgtgctcaacccttgggaccaggtcaaaaggaacgcagtacccataactcctacattgaacagagagcaactttcaacatcagaggaaaactccaagaaaactgtagatatggagtcaacagaggtctttacaaagaaaaccaagctcactgaagaggagaagaatcgccttaacttcctgaagaaaatttcacaaaggtatcagaagttcgccttgcctcagtatctcaagaccgtataccagcatcaaaaggctatgaaaccctggattcagccaaaaacaaaggtcatcccttatgtcaggtatctg

SEQ ID NO: 275 - DNA, 666 bp, synthetic construct
  source 1..666: mol_type = other DNA
atgaaattttttatctttacttgcctcctcgccgtagccctcgctaagaacacaatggagcatgtgagttccagcgaagagtccataatctcccaagagacctacaagcaggaaaagaatatggctatcaaccccagtaaggagaacctctgtagcaccttttgcaaagaagtagtgagaaatgcaaatgaagaagagtattctattgggtcttcatcagaggagtctgccgaggtcgctaccgaggaggttaagatcacagtggatgacaagcattatcagaaggcacttaatgagattaatcaattctaccagaaattccctcagtacctgcaatatctttatcaaggccccatagtccttaatccttgggaccaagtgaagcgtaatgctgtgcctatcacccccactcttaaccgtgagcaactctccaccagcgaggagaacagcaaaaagaccgtggatatggaatcaactgaagtgtttacaaagaagacaaagctgactgaggaggagaagaatcgtctcaatttcttgaaaaagattagtcagcgttaccagaaatttgctctcccccagtatcttaaaaccgtctatcaacaccaaaaagccatgaagccctggatccaacctaaaactaaagttattccatacgtgcgttacttg

SEQ ID NO: 276 - DNA, 666 bp, synthetic construct
  source 1..666: mol_type = other DNA
atgaaatttttcatattcacctgccttctggccgtagcactcgctaagaacacaatggagcacgtgtcttcttccgaagaaagtattatctctcaagagacctacaagcaggaaaaaaatatggcaattaacccaagcaaggaaaatctctgttcaaccttctgcaaagaagttgtgcgtaacgctaacgaggaggagtatagcattgggagttcatccgaagagtcagctgaagtcgccaccgaggaagtcaagataactgtagatgacaaacactaccaaaaagccctgaatgaaataaaccaattttaccaaaaattcccccaatatctccaatatctctaccaaggacccattgtcttgaatccatgggatcaagtcaagaggaacgcagtacctataactccaactctcaaccgtgaacaactgagcactagtgaagaaaattccaaaaagactgtggatatggagagcacagaagtttttacaaagaaaaccaaactcacagaagaggaaaagaaccgtctgaatttcttgaagaaaatcagccaaagatatcagaaattcgccctgccacaatatctcaaaactgtgtatcaacatcagaaagcaatgaagccatggatacaacccaaaacaaaggttataccctatgttcgttatctg

SEQ ID NO: 277 - DNA, 666 bp, synthetic construct
  source 1..666: mol_type = other DNA
atgaaatttttcatctttacttgcctgctggctgttgccctcgcaaaaaacactatggaacatgtctctagttcagaggagtcaattatcagccaagagacctacaaacaggaaaagaatatggctatcaacccaagtaaagaaaacctctgttctaccttttgcaaggaggtcgttaggaatgccaatgaagaagagtattctatcggctcatccagcgaagaatctgctgaggtagcaacagaggaagtcaagatcacagtggatgacaagcactatcagaaggccctgaatgaaatcaatcaattctatcaaaaatttccccagtatcttcaatacctctatcagggcccaatcgtcctcaacccctgggatcaagtgaagcgcaacgctgtacctattacacccaccctgaatagagaacagctcagcacctctgaagagaactccaagaagaccgtagatatggagagcactgaggtgttcaccaagaagactaaattgactgaagaggagaagaatagactgaattttcttaagaagataagtcaacgttaccaaaagtttgccttgcctcagtatctgaaaaccgtgtaccagcatcagaaggcaatgaagccttggatacaacctaagaccaaggtcatcccttatgtcaggtatctc

SEQ ID NO: 278 - DNA, 666 bp, synthetic construct
  source 1..666: mol_type = other DNA
atgaagttttttatctttacttgtctgttggctgttgcccttgcaaagaacacaatggaacatgtctcctctagtgaggagtctataatatcacaagagacatataagcaagaaaaaaacatggctatcaacccatcaaaggagaatctctgtagtaccttttgcaaggaagtagtccgcaacgctaatgaagaagagtattccatcggtagttctagcgaagaaagcgctgaggtggctactgaagaggttaagataacagtagatgataaacattaccagaaggctctgaatgagataaatcagttctaccaaaagttcccccaataccttcagtatttgtaccaaggtcctatcgtgttgaatccctgggatcaagtgaagcgcaacgctgtccctatcactcctactcttaacagggagcagctctccacttcagaagaaaatagcaaaaaaaccgtggacatggaatccacagaggtcttcaccaagaaaacaaagctgactgaagaagaaaagaatcgtctcaactttttgaagaagatttctcaaagataccagaaatttgctcttccccaatacctgaagaccgtgtaccagcaccaaaaggcaatgaaaccttggatacagcctaaaactaaggtaattccatacgttagatacctc

SEQ ID NO: 279 - DNA, 666 bp, synthetic construct
  source 1..666: mol_type = other DNA
atgaaattctttatttttacttgtctgcttgctgttgctctggctaagaacactatggaacacgttagcagcagtgaagagtctataatctcacaggaaacatacaaacaggagaaaaacatggcaattaacccatctaaagagaatctttgtagcactttctgcaaagaagttgtcagaaacgccaatgaagaggagtatagtataggttcaagttccgaggaatcagctgaggtggcaacagaagaagtcaaaatcactgtggacgataaacactatcagaaggcacttaacgagataaatcaattctaccagaaatttccacaatatctgcaatacctttaccaagggccaatcgtgcttaacccctgggaccaggtgaaaaggaacgctgtccccatcacacctacattgaatagagaacagctgtcaacttccgaagaaaattctaaaaaaaccgtggacatggaaagtactgaagtcttcactaaaaagactaagttgaccgaggaggagaaaaacaggttgaacttcctgaagaaaattagtcaaagataccagaagttcgccctgccccaatacttgaagaccgtgtatcagcatcagaaggcaatgaagccctggattcaacccaaaaccaaagtgatcccttacgtccgttacctc

SEQ ID NO: 280 - DNA, 666 bp, synthetic construct
  source 1..666: mol_type = other DNA
atgaaattctttattttcacctgtcttctggccgtcgcactcgccaaaaacaccatggaacacgtatcatcctccgaagaaagcatcatatcccaggaaacatacaaacaggaaaagaacatggcaataaatccaagtaaagaaaatctgtgctccaccttctgtaaagaagttgtacgcaacgctaacgaagaagaatattctataggatcatcctccgaggaatcagctgaagtagcaacagaggaagtcaagataaccgtggatgacaagcattatcagaaagctctcaatgagatcaatcagttctatcagaagttccctcagtacctccaatatctttatcaaggcccaattgtgttgaacccctgggaccaggttaaacgtaacgccgtaccaatcactccaacccttaaccgtgagcagctctcaacatctgaagaaaatagcaaaaagacagttgatatggagagtaccgaggtgtttacaaagaagaccaaactcaccgaggaagaaaagaataggctcaatttcttgaagaaaatatcccagagataccaaaagtttgccctgcctcaatatttgaaaactgtctatcagcaccagaaggcaatgaagccctggatacagcctaagacaaaggtgatcccatacgtaaggtatctt

SEQ ID NO: 281 - DNA, 666 bp, synthetic construct
  source 1..666: mol_type = other DNA
atgaagttcttcattttcacctgcttgctcgctgtagcacttgcaaagaacactatggagcacgttagcagtagtgaagaatccattatttctcaagagacttacaagcaagaaaaaaacatggcaataaatccaagcaaggagaatctgtgttccaccttctgcaaagaagtagtgagaaacgctaacgaagaggagtattcaatcggaagtagttcagaagagtctgctgaagtggccaccgaagaagttaagatcaccgtagatgataagcactaccagaaagcactcaacgagataaaccagttttatcaaaaatttcctcaatacttgcagtatctctatcaggggcccatagttctgaatccttgggaccaagtcaaacgtaatgcagtgccaataacccctaccttgaaccgtgaacaactgagtacatccgaagaaaattctaaaaaaaccgtagacatggagagtactgaggtatttacaaaaaaaaccaagctcaccgaagaggagaagaatcgtctcaattttctgaagaagatttcccagcgttaccagaaattcgctttgcctcaatacctcaagaccgtttaccagcatcagaaagctatgaagccctggattcaaccaaagaccaaggtaatcccctatgttagatatctc

SEQ ID NO: 282 - DNA, 666 bp, synthetic construct
  source 1..666: mol_type = other DNA
atgaaattttttatctttacctgtctgttggcagttgcactggccaaaaacacaatggagcacgtcagctcttctgaggaatcaataatttcacaagagacttacaaacaagagaaaaacatggccattaacccctccaaagaaaatctttgcagtacattctgtaaagaggtagtgcgtaatgcaaatgaggaagaatactctattggaagcagcagtgaagagagtgctgaagttgcaactgaggaagtcaagatcaccgtagacgataaacattatcagaaagcattgaacgagatcaatcagttttatcaaaaattccctcagtaccttcagtacctgtaccaaggtcccattgtcctcaacccttgggatcaggtgaaacgtaatgctgtaccaatcacaccaaccctgaatcgtgagcagctttcaactagcgaagaaaattcaaagaaaactgttgacatggaatctaccgaggtgtttacaaaaaagacaaagcttacagaagaagagaaaaaccgccttaacttcctgaagaaaatttcccaacgctaccagaagttcgctcttccccagtacttgaagactgtttaccagcaccaaaaagctatgaaaccttggattcagcccaaaactaaagttatcccctatgtacgctacctt

SEQ ID NO: 283 - DNA, 666 bp, synthetic construct
  source 1..666: mol_type = other DNA
atgaagttctttatttttacttgtctcttggcagttgcacttgcaaaaaacacaatggaacacgttagctcaagtgaagagtctataatatcccaagaaacctataagcaggaaaagaacatggcaataaacccaagtaaagagaacttgtgctccacattttgtaaagaagtcgtccgcaacgccaatgaggaggaatactccataggttctagttcagaggaatccgctgaagtcgccactgaagaagtgaagataaccgtagacgacaagcactaccaaaaggctcttaacgagatcaaccaattctaccaaaagtttccccaatacttgcaatacctctaccaaggccccatagtattgaacccctgggatcaagtaaaaaggaacgcagtgcctattactcccacactcaatcgcgagcaactcagtactagcgaagaaaacagtaaaaagaccgtagatatggagagtacagaagttttcacaaagaagaccaaactcacagaggaagaaaaaaataggcttaattttctgaagaagataagtcagaggtatcaaaagtttgctttgccccaatacctgaaaacagtttatcaacaccaaaaagctatgaagccttggatccagcccaagacaaaggttatcccctacgttcgctacctc

SEQ ID NO: 284 - DNA, 666 bp, synthetic construct
  source 1..666: mol_type = other DNA
atgaaattctttatttttacatgtcttttggcagtcgcccttgccaagaatactatggaacacgtctcatccagcgaagaatctataatctcccaggaaacttataagcaggagaaaaacatggctattaatccctccaaggaaaatctttgttccacattctgtaaagaggtagtccgcaatgcaaacgaggaggagtatagtatcggctcaagttcagaagagagtgctgaagtagcaactgaggaagtaaagataacagtagacgacaaacactatcaaaaggctctcaacgaaattaatcaattctaccagaagtttccacagtacctccaatatctttaccagggtcccatcgtattgaatccctgggaccaagtgaagcgcaatgctgtacctatcactccaactttgaatagagagcaacttagcacctccgaggaaaatagtaaaaaaactgttgacatggagtccaccgaagtatttacaaaaaagaccaagctcactgaagaagagaaaaataggttgaatttcttgaagaaaatcagtcaaaggtaccagaagttcgctcttccccagtaccttaaaacagtctaccaacatcaaaaagcaatgaaaccctggatacagcccaaaactaaggtcatcccatatgttcgctatctg

SEQ ID NO: 285 - DNA, 666 bp, synthetic construct
  source 1..666: mol_type = other DNA
atgaagttctttatttttacttgtctcctggccgtggcccttgccaaaaataccatggaacatgtcagctcatctgaagagtccataataagccaagaaacttacaaacaggagaaaaacatggccataaacccatccaaggagaatttgtgctccactttttgcaaagaggtggtgagaaacgcaaacgaggaagagtattccatcggatcatcctctgaagagagtgccgaagtcgcaaccgaggaagtgaagatcaccgtcgatgacaagcattatcaaaaggcacttaatgagatcaatcagttttaccaaaagtttccccagtatcttcaatacctgtatcagggacctatcgtcctgaacccttgggatcaggtgaaaaggaatgccgtaccaattactcccacattgaatagagagcaactgtctacaagtgaggaaaattcaaagaaaaccgtagacatggagtctaccgaagtcttcactaagaagactaaactcaccgaagaagagaaaaatcgtctgaactttctcaaaaagatttcccaacgctatcagaaatttgcattgccacagtatttgaagaccgtgtaccaacaccaaaaggccatgaaaccctggattcagcctaagacaaaggtaatcccttatgtcaggtatctt

SEQ ID NO: 286 - DNA, 666 bp, synthetic construct
  source 1..666: mol_type = other DNA
atgaagtttttcatcttcacctgcttgctggctgtagctctcgcaaaaaataccatggagcatgtgtctagcagtgaagaaagtataataagccaagagacatacaagcaagagaaaaatatggccataaatccttccaaagaaaatttgtgctcaaccttttgtaaggaagtcgtgaggaacgccaacgaggaggagtacagcataggttcatcatcagaggagagtgcagaggtcgctacagaggaagtgaaaatcacagtagatgataagcactaccaaaaggcccttaacgaaattaaccagttttatcaaaaatttccccaatacctgcaatacctttatcaaggcccaatagtgttgaatccctgggatcaagtcaagaggaacgcagtccccatcacccccacattgaatagggaacaattgtcaacaagcgaagaaaattcaaagaaaactgtcgacatggaatctaccgaggtattcacaaaaaagactaagttgacagaagaggaaaagaacagactgaactttctgaagaagatttctcaaaggtatcaaaagtttgctctcccacagtatttgaagactgtgtatcaacatcagaaggccatgaagccttggatccaaccaaaaactaaggtcataccctatgtgcgctacctt

SEQ ID NO: 287 - DNA, 666 bp, synthetic construct
  source 1..666: mol_type = other DNA
atgaagtttttcatctttacctgccttcttgccgtcgcattggctaaaaacaccatggaacatgtgtcttcctctgaagagagtataatttcacaagagacctacaaacaggaaaagaatatggctatcaaccccagcaaggaaaatctgtgctccacattttgtaaggaagtagtcagaaacgctaacgaggaggaatacagtataggaagcagcagcgaagaaagcgccgaagtcgctactgaggaagttaaaataactgtagacgataaacactatcaaaaagccttgaacgagatcaatcaattttatcagaaattccctcagtatcttcagtatctctaccagggcccaatagtattgaacccttgggatcaggtgaaaaggaacgcagttccaatcacccccacattgaatagagaacagctttcaacttctgaggagaatagcaagaaaaccgttgacatggaaagtaccgaggttttcacaaaaaaaactaagctgacagaagaagaaaagaaccgtctcaacttcttgaagaagatcagtcagcgttaccaaaagtttgccttgccccagtatctgaagactgtgtaccaacaccaaaaggccatgaagccatggattcaaccaaaaacaaaagtcatcccttatgtgagatacctg

SEQ ID NO: 288 - DNA, 666 bp, synthetic construct
  source 1..666: mol_type = other DNA
atgaagttttttatttttacttgcctccttgccgtcgctcttgcaaagaacacaatggaacacgtttcaagtagcgaggagtcaataataagccaagagacatacaaacaggaaaaaaacatggccattaatcctagtaaagagaacctttgctctaccttttgtaaggaagtagttaggaatgccaatgaggaagagtacagcatcggctcttcctccgaggaatctgccgaagtcgcaactgaagaggtcaagataactgtcgatgacaaacattatcagaaggctctcaacgagatcaaccagttttaccagaagttcccccaataccttcagtatctgtatcagggacccatcgtcttgaatccatgggaccaagtgaaacgtaacgcagtgccaattacacctactctgaaccgcgaacaactctcaacatctgaggaaaattcaaaaaaaaccgttgacatggaatcaaccgaggtattcactaagaaaaccaagctgactgaagaggaaaagaaccgtcttaattttctcaaaaagattagccaacgctatcagaagtttgctctgccccagtacctgaagaccgtctaccagcaccaaaaggccatgaaaccatggatccagcctaagaccaaggtaataccctacgttagatatctt

SEQ ID NO: 289 - DNA, 666 bp, synthetic construct
  source 1..666: mol_type = other DNA
atgaagttctttattttcacctgcttgttggctgttgcacttgcaaagaacaccatggagcatgtctcctcttccgaggagagtataatttcccaggagacatacaagcaggaaaaaaatatggctataaacccaagcaaagagaacctctgctcaaccttttgtaaagaagtcgtcaggaatgctaacgaagaggaatatagcattggatccagtagtgaagaaagcgccgaggtagcaaccgaagaagtgaagattactgtggatgacaaacattatcagaaggcattgaacgaaattaatcagttttatcaaaagtttccacaatacttgcagtacctttaccagggaccaatagtccttaatccctgggatcaagtgaagcgcaatgcagtaccaataactcctactctcaatagagagcagctgtccacaagcgaggaaaactccaagaaaactgtggacatggagtctactgaggtatttacaaagaagacaaagctgaccgaagaggagaagaaccgcctcaatttcctcaagaaaatatcacaacgctatcagaagtttgcccttccccaatatcttaaaaccgtatatcaacaccagaaagcaatgaaaccctggatacaacctaagacaaaagtgattccctatgttcgttacttg

SEQ ID NO: 290 - DNA, 666 bp, synthetic construct
  source 1..666: mol_type = other DNA
atgaagttctttatcttcacttgtctgctggctgtcgctctggctaaaaacaccatggagcacgtgtcctcttccgaggagtccattatctcccaggaaacatacaagcaagagaaaaatatggcaatcaacccttccaaagagaacctgtgtagtacattttgtaaggaggtcgtccgtaatgcaaatgaagaagaatatagtataggatccagcagcgaagagtcagctgaggtagctactgaggaggtgaagataactgttgatgataagcattatcaaaaggctcttaacgaaataaatcagttttaccaaaagttcccacaatacttgcaatacctctatcaagggcctatcgtcttgaatccatgggaccaagtaaaacgtaacgcagttccaattacccctacccttaatcgtgagcaactgtccacttcagaggaaaactctaagaaaacagtcgatatggaaagtaccgaagtctttaccaagaagacaaaattgaccgaagaggagaagaaccgtctgaactttttgaagaagatcagtcagcgctaccaaaaattcgctctgcctcaataccttaaaacagtctatcagcaccaaaaagccatgaagccctggatacaacctaagacaaaggtcattccttatgtgcgctacctc

SEQ ID NO: 291 - DNA, 666 bp, synthetic construct
  source 1..666: mol_type = other DNA
atgaaatttttcattttcacctgtctgctcgcagtagcccttgcaaagaacacaatggagcacgtaagtagttcagaagaatctatcataagccaagagacctataagcaagaaaaaaacatggctatcaacccttccaaggaaaatctctgctctacattttgcaaagaagtggtccgcaacgcaaacgaagaggaatatagcataggatctagtagcgaggaatccgctgaggtggccaccgaagaagtaaaaatcactgtcgatgacaagcattaccagaaggccctcaatgagattaatcaattttaccagaagtttccccagtatttgcaatatctgtaccaaggccccattgttcttaacccctgggaccaagttaaaaggaacgccgtacctattacaccaaccttgaatcgcgaacaactgagtacatctgaggagaatagcaagaaaacagtcgatatggaatccaccgaggtttttacaaagaaaacaaaactgacagaagaggaaaaaaatcgcctgaactttctcaaaaagatcagccaaagataccaaaaatttgcccttcctcaatacctcaaaaccgtatatcagcatcaaaaggccatgaagccttggatccaacccaagaccaaagtgatcccatatgtacgttatctt

SEQ ID NO: 292 - DNA, 666 bp, synthetic construct
  source 1..666: mol_type = other DNA
atgaaattttttattttcacatgcctcctggctgtagcacttgccaagaataccatggaacacgtcagcagcagtgaggagtctatcatctctcaagaaacctataaacaagagaagaatatggctattaaccccagtaaagagaatttgtgcagcactttctgcaaagaagtggtccgtaatgcaaatgaagaggagtacagtattggtagttcatccgaagaaagtgcagaggtagccaccgaggaggttaagattaccgttgatgataaacactatcaaaaagcactgaacgagattaaccaattctatcagaaatttcctcaatatcttcaatacctgtaccaagggcctatagtactgaacccatgggaccaggttaagcgtaacgccgtacccataactcccactttgaaccgcgagcagctgtctacttcagaagaaaactccaaaaaaaccgttgatatggaaagtacagaggtgtttacaaaaaagacaaagctgaccgaagaagagaaaaataggctgaacttcctcaagaagatatcccaaaggtatcagaaatttgccttgccacagtacttgaagacagtgtatcagcatcaaaaagctatgaaaccttggatacaaccaaaaaccaaggtgatcccctatgttcgctatttg

SEQ ID NO: 293 - DNA, 666 bp, synthetic construct
  source 1..666: mol_type = other DNA
atgaaattcttcatattcacttgcctgctcgcagtagcccttgccaaaaacacaatggaacacgtatcatctagtgaagaaagcatcatttcacaggaaacatacaaacaggagaaaaatatggctattaacccttccaaggaaaacctgtgttcaacattttgcaaggaggtggttcgtaatgctaatgaggaagaatactcaattggatctagctccgaagagtccgcagaagttgctacagaggaagtaaaaattactgttgacgacaagcattaccaaaaagcactgaatgagattaaccaattttatcagaaattccctcagtatctgcaatatctctatcaggggccaattgttctgaacccatgggatcaggttaagcgtaatgccgttccaattaccccaacactgaatagagaacagctcagcaccagcgaagaaaactctaaaaagactgtagatatggagagtactgaggtgtttacaaagaagacaaaacttactgaggaagagaagaaccgtctgaatttcctcaagaaaatatcccagaggtatcagaaatttgccctgcctcagtatctcaagacagtttatcaacatcaaaaggctatgaaaccctggattcaacccaagaccaaagtgatcccctacgttagatacctg

SEQ ID NO: 294 - DNA, 666 bp, synthetic construct
  source 1..666: mol_type = other DNA
atgaaatttttcatatttacatgtttgctcgccgtggcccttgctaaaaataccatggaacacgtgagctcaagcgaagaatcaatcattagccaggagacctataaacaagagaagaacatggctataaacccctccaaagagaatctctgcagcaccttttgcaaggaggtagttaggaacgctaacgaagaggaatactctataggttcaagtagtgaggaaagtgcagaagtggcaacagaggaggtcaagataactgtggatgataaacattaccagaaggccttgaacgaaataaaccagttttatcaaaaatttccccagtacctgcagtacctctatcaaggtcctatagtactgaatccctgggaccaagttaagcgcaatgcagtacccatcacacccacactgaatcgtgagcaactctccactagcgaggagaacagcaaaaagaccgtggatatggagtcaacagaagtatttaccaagaagaccaagctgactgaagaggagaaaaatagattgaatttcctcaaaaagatttcccaacgctatcaaaaattcgcacttcctcaatatctcaaaaccgtttatcaacaccagaaagcaatgaagccatggattcagccaaagaccaaagtaatcccatacgtcaggtacttg

SEQ ID NO: 295 - DNA, 666 bp, synthetic construct
  source 1..666: mol_type = other DNA
atgaaattcttcatatttacctgtcttctggcagtagcactggcaaaaaatacaatggagcacgtcagcagctctgaagagagtattatttcccaagagacctacaaacaagagaagaacatggctattaacccttccaaagaaaatttgtgttcaacattttgcaaggaggtcgtaaggaacgctaatgaagaagaatacagcattggctcatcctccgaggagagtgcagaagtcgccaccgaagaagtcaaaattaccgtcgacgataagcactaccagaaggccctgaatgaaataaaccagttctaccaaaagttcccacaatatctgcagtatctttaccaaggccccatcgtgctcaatccttgggatcaggtcaaacgtaatgccgtgcctataactcctacactgaaccgtgaacaacttagtacttccgaggagaactctaagaagacagtagatatggagagtactgaagtgttcaccaagaagacaaagttgaccgaggaggagaagaaccgccttaattttctgaaaaagattagccagcgctaccagaagtttgctttgccccagtatttgaagacagtatatcagcatcaaaaagcaatgaagccctggatacaacccaagaccaaggtgattccttatgtgaggtatctt

SEQ ID NO: 296 - DNA, 666 bp, synthetic construct
  source 1..666: mol_type = other DNA
atgaaattttttatcttcacctgcctgctggccgttgctcttgctaagaatactatggaacatgtcagctcctctgaggagtccataataagccaggagacttacaagcaagaaaaaaacatggccataaatcctagcaaggaaaatctttgctctacattctgtaaggaggtagtacgcaatgctaatgaggaggaatatagcatcggaagttcttcagaggagtccgccgaggtggctacagaagaagtcaagataacagtagatgataagcattatcagaaagcactgaacgaaattaaccaattctaccaaaaattcccacaatacttgcaatacctgtaccaggggccaatagtattgaatccctgggaccaagtcaagagaaatgccgttcctattacacccaccctcaatagggaacaactctccacctctgaggaaaatagtaaaaagactgtcgacatggagtctaccgaagtatttactaagaagacaaaattgacagaggaagaaaagaatcgtttgaactttctgaaaaaaattagccagcgttatcaaaaattcgctttgccacagtatttgaaaaccgtgtatcaacatcaaaaagccatgaagccctggatacaacctaagactaaagtgataccatacgtgcgttatttg

SEQ ID NO: 297 - DNA, 666 bp, synthetic construct
  source 1..666: mol_type = other DNA
atgaagttcttcatatttacatgtctgttggctgtagctctcgccaaaaataccatggaacatgtgagcagttctgaagaatcaattatctctcaggagacatacaaacaggaaaagaacatggccattaatccttctaaagaaaatttgtgttccactttttgcaaggaggtagtccgtaatgctaatgaagaagaatatagtataggttctagcagtgaggagagtgctgaagtcgctacagaggaagtcaaaatcacagtggatgataagcactaccagaaggcactcaacgaaataaaccaattttatcaaaagttccctcaatatcttcaatatctctatcagggaccaatcgtactgaacccttgggatcaagttaagcgtaatgctgtgccaataacacctacactgaatagggagcaactgtctacttctgaggaaaatagcaagaagacagttgacatggagagcaccgaagtgttcacaaagaagaccaaacttactgaagaagaaaagaacagactcaactttttgaaaaagatttctcagcgctaccagaagtttgcattgccacagtatcttaagaccgtctaccaacatcagaaagctatgaagccttggattcaacccaaaacaaaagtcattccatacgttaggtacttg

SEQ ID NO: 298 - DNA, 666 bp, synthetic construct
  source 1..666: mol_type = other DNA
atgaaattcttcatcttcacctgtctgctcgccgtagcacttgcaaagaacacaatggagcacgtatctagcagtgaagagagcatcataagtcaggaaacttataaacaagagaaaaatatggctataaacccatcaaaagagaacttgtgtagcactttttgtaaagaggtcgttaggaacgctaacgaggaagaatactccataggtagctctagtgaagagagtgctgaagtggctacagaagaggttaaaataacagtggacgacaagcactaccaaaaggccctcaacgagatcaaccaattttatcaaaagtttccccaatatcttcaatatctgtaccagggacctattgtgctcaatccatgggatcaagtcaagcgcaatgctgtgcccattactcccactctcaacagggagcagctttccacctctgaagagaatagtaaaaagacagtggacatggagtcaactgaagtattcaccaaaaagaccaagcttacagaagaggagaagaatcgtctgaattttcttaaaaagatatctcaacgttaccagaagtttgcactgccccaatacttgaagaccgtgtatcagcaccaaaaggctatgaaaccctggatccagcccaaaactaaggttattccatacgttcgctacctt

SEQ ID NO: 299 - DNA, 666 bp, synthetic construct
  source 1..666: mol_type = other DNA
atgaaattttttatcttcacctgtcttcttgccgtagcactcgccaaaaacactatggagcacgtcagttcttctgaagagagtattatctcacaagagacctacaaacaagagaagaatatggcaatcaacccttccaaagagaatctctgctccacattttgtaaagaggttgtgcgtaacgctaacgaggaggaatatagtataggaagtagttctgaagaatctgctgaggttgcaacagaggaagtgaaaataaccgttgacgacaaacattaccagaaagcactcaacgagataaatcagttttatcaaaaattcccacaatatctccagtatctctatcagggaccaatagttctcaacccttgggatcaggttaagcgtaatgcagtccccattactcccaccctgaatcgcgaacaactgtccactagcgaagagaacagcaaaaagaccgtagatatggagtcaactgaggtctttaccaagaaaactaagctcacagaagaggaaaagaatcgccttaatttcctcaagaaaatctcccagcgctatcagaagtttgcccttccccagtaccttaaaacagtatatcaacaccaaaaggcaatgaagccctggatacaacctaagaccaaggttattccctacgttagatatctt

SEQ ID NO: 300 - DNA, 666 bp, synthetic construct
  source 1..666: mol_type = other DNA
atgaagttttttatattcacatgcttgttggcagttgcacttgctaagaatacaatggagcatgttagtagcagtgaggaatcaatcatcagccaggagacttataagcaagagaagaacatggctataaatccttcaaaagaaaacctctgcagcacattctgtaaggaggtggtcagaaacgcaaatgaggaagagtattcaatagggtctagtagtgaagaatctgctgaagtagcaactgaggaagttaagattactgtagacgataaacactaccagaaggcactgaacgagattaaccaattctatcaaaagtttcctcagtatcttcaatacctttatcaagggcctatcgtgctcaacccatgggatcaagtaaaaagaaatgcagtccccatcaccccaaccttgaacagggagcagctttccacttccgaagagaactctaaaaaaactgtggacatggagtcaaccgaagtgttcactaagaaaacaaagctgacagaagaagagaaaaataggctcaatttcttgaaaaagattagtcaacgctaccaaaagttcgcactcccacaatacctgaagaccgtctaccagcatcaaaaggcaatgaaaccctggatacagcccaaaaccaaggtaattccctatgtgagatatctt

SEQ ID NO: 301 - DNA, 666 bp, synthetic construct
  source 1..666: mol_type = other DNA
atgaaattcttcatcttcacatgtctcctcgcagtagccctggctaaaaatactatggagcatgtgagtagcagcgaggaatccattatctcacaagagacttacaaacaagaaaagaacatggcaataaacccatctaaagagaatttgtgtagcacattctgtaaagaagtagttcgtaacgccaatgaagaagaatatagtataggtagctctagcgaggagagcgcagaggttgccactgaggaagtaaagattacagtagacgataaacattatcagaaggcattgaacgaaatcaatcaattctaccaaaagttcccccaatatttgcaatacttgtatcagggtcctattgttttgaatccctgggaccaggttaagcgtaatgcagtaccaataacccctacactgaaccgcgaacagctcagcacctcagaagagaattcaaaaaagacagttgatatggaatctaccgaggttttcactaaaaaaacaaaactgacagaagaagagaaaaatcgcctcaatttcctgaagaagatttctcaaaggtatcagaagttcgccctgccacaatatctcaaaacagtatatcagcaccaaaaggccatgaagccttggattcagccaaagacaaaggttataccatacgtgagatacttg

SEQ ID NO: 302 - DNA, 666 bp, synthetic construct
  source 1..666: mol_type = other DNA
atgaaattctttatttttacatgcctgttggctgttgccctggctaaaaacacaatggaacatgtatcctcctctgaagaatcaattatttcacaagagacatataagcaagagaagaatatggctatcaatccaagcaaggagaacctctgttctacattttgcaaagaagtggttcgcaatgccaacgaggaagagtattctatcggcagttcatctgaggaatctgcagaagtagctacagaggaggtcaagattaccgtggacgacaagcactatcaaaaggcattgaacgagatcaatcagttttatcagaaattcccccaatatttgcagtacctgtatcaaggtccaatcgttttgaatccttgggaccaagtaaaacgtaacgccgtgccaattaccccaacactcaacagggaacagttgtccacttctgaggagaatagtaagaagacagtcgatatggagtctacagaggtatttactaagaaaaccaagctcaccgaggaggagaaaaatcgcttgaacttcctcaaaaagattagtcagcgttaccagaaattcgccctgccacaatacctcaaaaccgtttaccaacaccaaaaagctatgaaaccatggatacaacctaagacaaaagtcatcccatatgtccgctacttg

SEQ ID NO: 303 - DNA, 666 bp, synthetic construct
  source 1..666: mol_type = other DNA
atgaaatttttcatttttacttgtcttcttgctgttgcattggcaaaaaacacaatggaacatgtgtcaagctctgaagaaagtattatatcacaggaaacatataagcaggagaaaaacatggccatcaatccctccaaagaaaacctgtgctccaccttttgtaaagaagtcgtccgcaatgcaaacgaagaggaatatagcatcggcagctcaagtgaggaatccgccgaagtagcaacagaggaagtgaaaataaccgtagatgataaacattaccaaaaagccctgaatgaaatcaatcaattctatcagaagttccctcaatacctgcaatacctttatcaaggtccaatcgtactcaatccctgggaccaggtgaaaaggaatgcagtccccatcactcctactcttaatcgtgaacagctgtcaacatcagaggagaactccaagaaaaccgtggacatggaaagcactgaagtttttaccaaaaagactaaacttactgaagaagaaaagaaccgcctgaattttctcaagaaaatcagccagagataccagaagttcgccctgcctcaatacctcaaaaccgtttaccaacaccaaaaagcaatgaagccatggatccagcccaaaactaaagtgatcccatacgtccgttatctt

SEQ ID NO: 304 - DNA, 666 bp, synthetic construct
  source 1..666: mol_type = other DNA
atgaaatttttcatctttacctgtctcctggctgtagctctcgctaaaaataccatggagcatgtaagttcctccgaggaatcaataatatcacaggagacctataaacaagaaaaaaacatggcaattaatccatccaaggaaaatctgtgctccacattttgcaaggaggtcgtgcgtaatgcaaacgaggaagagtattcaattggaagttcttccgaagaaagtgcagaggtagctaccgaggaagtaaagataactgtggatgacaagcactaccagaaagccctgaacgagattaaccagttctaccaaaaatttcctcagtacctgcaatacttgtaccaaggacccatcgtcttgaacccctgggatcaggtcaaacgtaatgccgtacccataactcccactttgaatagggagcagctctccactagtgaggaaaactcaaaaaagaccgtagacatggagtccaccgaagttttcacaaaaaagactaagctgactgaagaagagaagaatcgcctcaatttcttgaagaaaattagtcaaaggtaccagaaatttgctctgccacaatacttgaagactgtatatcaacatcaaaaagccatgaaaccctggattcagccaaagactaaggtcataccctatgttaggtatctc

SEQ ID NO: 305 - DNA, 666 bp, synthetic construct
  source 1..666: mol_type = other DNA
atgaagttctttatatttacttgcttgcttgcagttgcactcgctaagaacacaatggaacacgttagctcctcagaagagtcaattatatcccaggaaacatataaacaggagaaaaatatggccatcaacccttctaaagaaaatctgtgttccactttctgtaaggaagtggtacgtaacgccaatgaggaggagtacagtatcggtagcagctctgaagaaagcgccgaagtggcaaccgaggaagtcaagataacagtcgatgacaaacattaccagaaagccttgaacgagatcaatcagttctaccagaaatttccccaatatttgcaatacttgtaccaaggccccattgtattgaatccatgggaccaggtaaagcgtaatgcagttccaattactcctaccctcaaccgcgaacagctcagcacatcagaagagaatagcaagaaaacagttgatatggaaagcactgaggtctttactaaaaaaactaaactgactgaggaagagaagaataggctcaacttccttaagaaaatctctcagagataccaaaagttcgcactgcctcagtaccttaagacagtatatcaacaccaaaaggcaatgaagccatggatacaacctaaaaccaaagttattccttacgtccgctacttg

SEQ ID NO: 306 - DNA, 666 bp, synthetic construct
  source 1..666: mol_type = other DNA
atgaagttttttattttcacatgcctcctggcagtggctctggcaaaaaacactatggagcatgtcagttcaagcgaggaatccattatctctcaggaaacatacaaacaagaaaagaatatggcaattaaccccagtaaagaaaatctctgctctacattctgcaaagaggtagttaggaatgccaacgaagaggagtatagcattggttcctcaagtgaagagagtgcagaggtcgctaccgaggaagtcaaaataactgtcgacgataagcactatcaaaaagctctgaacgaaataaaccagttctaccaaaagtttcctcaatacctgcagtatctttaccaaggccccattgtactcaatccctgggatcaggttaaacgtaacgccgtccccataacacctacccttaaccgtgaacaattgtctactagtgaagaaaactcaaagaaaaccgtggatatggagagtaccgaagtgttcacaaagaaaactaaattgaccgaagaagagaagaataggttgaatttcctgaagaaaatatctcaaaggtatcagaagtttgctttgcctcaatacttgaaaacagtttatcaacaccagaaggctatgaaaccatggattcagcctaagaccaaggtcatcccctatgtacgctatctc

SEQ ID NO: 307 - DNA, 666 bp, synthetic construct
  source 1..666: mol_type = other DNA
atgaagttcttcatcttcacctgtctccttgccgttgccctcgcaaagaatactatggagcacgttagtagtagtgaagaatctataatctctcaagagacatataaacaggaaaaaaacatggcaatcaacccaagtaaggagaacctctgctctaccttctgcaaagaagttgttcgcaacgccaatgaagaggagtatagtatcggcagcagctcagaggagtccgccgaagttgccactgaggaggtgaaaattacagttgacgataagcactatcagaaggccctgaatgagataaatcagttttaccagaaattccctcagtatttgcaatacttgtaccagggtcctatcgtacttaatccttgggatcaagtcaagcgtaacgcagtgccaattacacctaccctcaaccgtgaacaactctcaacctctgaggagaactccaaaaaaaccgtcgacatggagagcacagaagtgttcacaaaaaaaaccaaactgaccgaggaggagaagaatcgcctcaacttcttgaagaaaatatcacaaaggtaccagaaatttgctttgccccaatacttgaaaactgtataccagcaccagaaggctatgaaaccatggatacaacccaagacaaaggtgatcccttatgttcgttatctc

SEQ ID NO: 308 - DNA, 666 bp, synthetic construct
  source 1..666: mol_type = other DNA
atgaaattctttatctttacatgcctgcttgccgtggcacttgcaaagaacactatggagcacgttagcagttctgaagagtctattatatcccaggaaacctacaagcaggaaaagaatatggcaataaatccctccaaagaaaatctgtgttcaaccttttgtaaagaggttgttagaaatgctaacgaggaagaatatagtattggatcttccagcgaggagtccgctgaagtagcaactgaggaggtcaaaattaccgtagacgacaagcactatcaaaaagcactgaatgagatcaatcaattctatcagaaatttccccaatacctccaatatttgtaccagggtcctattgtgttgaatccttgggaccaagtcaaaagaaatgcagttccaatcacacctacactcaacagagagcagttgagtacttctgaggagaatagcaagaaaaccgtcgatatggaatccacagaagttttcaccaagaagacaaaactgactgaggaagagaagaatcgtttgaactttcttaaaaaaataagtcaaaggtaccaaaagtttgcactgcctcaatacctgaagactgtgtatcagcatcagaaagctatgaagccatggattcagcccaaaactaaagtgattccctatgtccgttatctc

SEQ ID NO: 309 - DNA, 666 bp, synthetic construct
  source 1..666: mol_type = other DNA
atgaagtttttcatatttacatgtctgctcgcagtcgcccttgctaaaaacaccatggaacatgtttcaagttctgaggagagtataattagccaagagacctataaacaggagaaaaatatggctattaacccctccaaggagaatctttgtagtacattctgcaaagaagtggtccgcaatgccaatgaggaggagtacagcataggtagctcatcagaagaatctgccgaggtcgccaccgaagaagtaaaaattacagtggacgacaaacattatcagaaagcactcaacgagattaaccaattctatcaaaagtttcctcagtacctccaatacctgtatcaggggccaatagtgcttaatccttgggaccaggttaaacgtaacgcagtgcccatcaccccaacccttaaccgtgagcaactctctacctcagaggaaaatagcaaaaagaccgtggatatggagtcaactgaggttttcacaaagaagacaaaattgaccgaggaagagaaaaatcgtctgaacttcttgaagaaaatttcccagcgctatcagaagtttgcactcccacagtatctcaaaaccgtctaccagcaccaaaaggcaatgaagccttggatacaaccaaagaccaaagtcataccatatgttcgctacttg

SEQ ID NO: 310 - DNA, 666 bp, synthetic construct
  source 1..666: mol_type = other DNA
atgaaatttttcatctttacttgcctgcttgcagttgccctcgcaaaaaataccatggaacatgttagctcttctgaggagtctataatctcccaggagacatataaacaagagaaaaacatggcaataaatccctccaaagagaatctctgctccacattctgtaaggaagttgtgaggaacgccaacgaagaggaatattccattggcagttcttctgaagaatccgcagaagtggccactgaggaggttaaaattacagttgatgataaacactaccaaaaggctctcaatgagattaatcaattctaccagaaatttccacagtatctccagtacctctatcaaggacccatcgtgcttaatccttgggaccaggtcaaacgcaatgccgttccaattaccccaaccctgaatagagagcagttgagcacctcagaagaaaatagcaaaaagaccgtggatatggaaagcactgaagttttcacaaagaaaacaaagctgaccgaggaagaaaagaatcgcttgaactttcttaagaaaatctcccaaagataccaaaagttcgccttgcctcagtatcttaaaactgtatatcaacatcaaaaggcaatgaaaccatggatccagcccaagaccaaagtcatcccttatgttcgctatctt

SEQ ID NO: 311 - DNA, 666 bp, synthetic construct
  source 1..666: mol_type = other DNA
atgaaattttttatcttcacttgcttgctggccgttgcacttgcaaaaaatactatggagcatgtgtcttctagcgaagagtctatcatttcccaggaaacttataagcaggagaagaacatggctataaaccccagcaaagagaacctctgtagcaccttctgtaaagaagttgtgagaaacgccaatgaagaagaatattccataggatcttccagtgaggagtctgctgaggtggctaccgaggaggtcaagatcaccgttgacgacaaacattatcaaaaggcactcaacgaaatcaaccaattttatcagaaatttcctcaatatcttcagtacttgtatcagggtcccattgtattgaacccctgggatcaggtgaagagaaatgcagtccctattactccaacccttaatagggaacagctctcaacaagcgaggagaatagtaagaaaacagtggacatggaatctactgaagttttcactaagaagaccaaactcactgaggaggaaaaaaaccgtctgaatttcttgaagaaaatctctcaaagataccagaagtttgcacttccccaatacttgaagacagtgtatcagcatcagaaagcaatgaaaccttggatccaacccaaaacaaaagttatcccctacgttcgttacttg

SEQ ID NO: 312 - DNA, 666 bp, synthetic construct
  source 1..666: mol_type = other DNA
atgaagttcttcatctttacctgcttgctggcagtggccctcgccaagaatactatggaacacgttagctcctccgaggaatctataatatcccaggagacatacaagcaagagaaaaacatggctatcaacccaagtaaagaaaacctttgttcaactttctgtaaggaagttgtgcgtaatgccaacgaggaagagtactccattggcagcagttccgaagagtccgcagaagtagccactgaggaggtcaagattacagtagatgataaacattatcaaaaggcattgaacgagataaatcaattttaccaaaaattcccccaatacctgcaatatctctatcaaggacctatcgttcttaacccatgggaccaggtgaagagaaatgccgtgccaattacccctaccctcaatagggagcagctgtctacttcagaagagaactcaaaaaagacagtcgacatggagtccactgaggtgtttacaaaaaaaacaaaactgaccgaagaagaaaaaaataggcttaactttctcaagaagataagtcagcgttaccagaaatttgctcttcctcagtacctgaagactgtatatcagcatcaaaaagcaatgaagccatggattcaaccaaaaaccaaagttatcccctacgttagatacctt

SEQ ID NO: 313 - DNA, 666 bp, synthetic construct
  source 1..666: mol_type = other DNA
atgaagttctttatttttacctgtttgctcgccgtcgcactcgctaagaatactatggagcatgttagttcaagcgaagaatccattatttctcaggaaacttacaagcaggagaaaaatatggccatcaatccatctaaggaaaacctttgcagtaccttctgcaaagaagtggtccgcaatgctaacgaagaggaatattcaatagggtccagttccgaggaatccgccgaagtagccactgaggaggttaaaatcaccgtggatgataaacattatcagaaagcacttaatgagattaaccagttctatcagaaatttcctcagtatctccaatacctctaccaaggccccatagtgttgaacccttgggaccaagtcaaacgcaacgcagtcccaataactcctactttgaatcgcgaacagctcagcacaagcgaggagaacagtaaaaagacagtggacatggagtctacagaagtttttactaagaaaactaagctgacagaggaagaaaagaacagactcaattttctgaaaaaaattagccaacgctatcaaaagttcgcccttccccaatacctcaaaacagtctaccagcaccagaaagctatgaaaccttggattcaacccaaaactaaagtaattccatatgttcgctacctt

SEQ ID NO: 314 - DNA, 666 bp, synthetic construct
  source 1..666: mol_type = other DNA
atgaagttctttatctttacttgcctgctcgccgtagctttggcaaaaaatactatggagcatgtgtccagctctgaagaaagtattatatcacaagaaacatataaacaggaaaaaaacatggcaattaacccctctaaggagaacctttgttcaaccttttgcaaggaggtcgtgagaaacgctaacgaggaagagtacagtattggctctagttccgaggaatccgctgaggttgccaccgaggaggtaaagattacagtagacgacaagcactaccagaaagctctgaatgaaattaatcagttttatcaaaaattccctcagtaccttcagtacttgtaccaaggtcccatcgttttgaacccctgggaccaagtaaaaagaaatgccgtaccaataacccctactctgaaccgtgaacaactgtctacatccgaagagaactcaaaaaagaccgtggacatggagtctacagaggtatttaccaaaaagactaaactcaccgaggaagagaaaaaccgcctgaacttcctcaagaagattagccagagataccaaaagtttgcacttcctcaatacctgaagactgtttaccaacaccaaaaagcaatgaagccttggatccagccaaagactaaggtaatcccttatgtccgttatctc

SEQ ID NO: 315 - DNA, 666 bp, synthetic construct
  source 1..666: mol_type = other DNA
atgaagttttttatttttacttgcctccttgccgtggccttggcaaagaataccatggagcatgtatcctcctctgaagaatcaattatatcccaggagacctacaaacaagaaaagaacatggcaataaatccatccaaggagaacctgtgcagtacattctgcaaggaggtcgtgaggaatgccaatgaggaggagtacagcatcggctcatctagtgaagaatccgctgaagttgcaaccgaagaagtgaagataacagttgatgacaaacattaccaaaaagccttgaacgagatcaaccaattttatcagaaatttcctcagtatcttcagtacctttaccaaggccccatagtcttgaacccatgggatcaggttaaacgtaatgctgtgcctatcacacctacccttaaccgtgagcaattgtcaacaagcgaggagaactccaagaagactgttgatatggagtccactgaggtcttcacaaagaaaacaaaacttacagaagaagaaaagaatcgccttaattttctcaagaagattagccaacgctaccaaaagtttgctttgcctcagtatcttaagaccgtatatcagcatcagaaggctatgaaaccatggattcaacctaaaaccaaggtgatcccatatgtgcgctatttg

SEQ ID NO: 316 - DNA, 666 bp, synthetic construct
  source 1..666: mol_type = other DNA
atgaagttcttcatattcacctgccttttggccgttgcattggcaaaaaacacaatggagcacgtctcctcttctgaggagtccatcataagccaggagacatataagcaagaaaaaaacatggccattaacccttctaaagaaaacctttgctcaactttttgcaaagaggtggtccgcaacgctaatgaggaggaatactctattggttcaagtagcgaagaaagcgctgaggttgctaccgaggaggtgaagatcaccgtggacgacaagcactatcagaaggctctcaacgagataaatcagttttatcagaaatttccccaataccttcagtatctctatcaaggtcctatcgttctcaatccttgggaccaagtgaagagaaacgcagtccctattacccccacactgaatagggaacagttgtcaacatccgaagagaatagtaaaaagacagtcgatatggagagtactgaagtgtttaccaagaagacaaaattgaccgaagaggagaaaaatagactcaacttccttaaaaagataagtcaacgctaccaaaagttcgcactgccccaatatctgaaaactgtatatcagcaccaaaaagctatgaagccctggatacagccaaagacaaaagtgataccatatgtcagatatttg

SEQ ID NO: 317 - DNA, 666 bp, synthetic construct
  source 1..666: mol_type = other DNA
atgaagttcttcatctttacttgtctgctggctgttgcattggctaaaaatacaatggaacacgtgagtagcagcgaagaaagcataatttcacaggagacctacaaacaggagaagaatatggcaataaaccctagcaaagaaaacctgtgctccacattctgtaaggaagtcgttagaaacgcaaatgaggaggagtattccatcggcagctcctcagaggagtctgcagaggtagccaccgaagaggtaaagataaccgttgacgacaagcattatcaaaaggctcttaacgaaataaaccaattctatcagaaatttcctcagtatctccagtacctttaccagggtccaatagtcctcaatccctgggatcaggtaaagaggaatgccgtacctattacaccaacactcaatcgtgagcagctttcaacttccgaagaaaactccaaaaaaaccgtcgatatggaatctactgaagtcttcaccaaaaagaccaagctcaccgaagaagagaagaatagactgaacttcctcaaaaagatcagtcagcgttatcagaaatttgcccttcctcagtacctgaaaactgtctaccaacatcagaaagcaatgaaaccatggatccaacccaaaacaaaggtaattccttatgtaagatacctc

SEQ ID NO: 318 - DNA, 666 bp, synthetic construct
  source 1..666: mol_type = other DNA
atgaagttctttatattcacctgcttgcttgccgtcgctcttgccaaaaacacaatggaacatgtgagtagtagcgaggagtccattataagccaagaaacttacaaacaagagaaaaacatggcaataaatccatccaaggagaatttgtgttcaactttttgcaaggaggtagtgagaaatgcaaacgaggaagagtatagcattgggtcatcaagtgaagaaagtgcagaggttgcaactgaagaagtaaaaataactgtggacgacaagcactatcagaaggcactgaatgagataaatcagttttatcaaaaattcccccagtatctccagtacctgtaccaaggacccatagtcctgaacccttgggaccaggttaaacgcaatgccgtccccattactcccacacttaaccgcgaacaactcagtacctcagaggaaaattcaaagaagactgttgatatggaaagcaccgaagtcttcaccaaaaagactaagttgaccgaagaggaaaaaaataggctcaatttcctcaagaaaataagtcagcgctaccagaaatttgccttgccccaatacttgaagactgtttatcagcatcaaaaagctatgaagccttggatacaacctaaaactaaggtgataccttatgtcaggtatctc

SEQ ID NO: 319 - DNA, 666 bp, synthetic construct
  source 1..666: mol_type = other DNA
atgaaatttttcatattcacctgtctgctggctgtagcccttgccaaaaacacaatggagcacgtttctagctccgaagaatcaattatctcacaggaaacttataaacaggaaaaaaacatggctatcaatcctagtaaagaaaatctctgctcaactttctgtaaagaagtggttcgtaacgcaaacgaagaggaatacagcattggttcttcaagcgaagagagtgcagaggtagccaccgaggaagtgaaaattacagtggacgataagcattatcaaaaggctcttaatgagataaatcagttttaccagaagtttccccagtatcttcaatacctttaccagggaccaatcgtcctgaatccctgggatcaggtgaaacgcaacgcagttccaattacacccacactcaacagagagcagttgtccacatccgaggagaatagtaaaaaaaccgtagacatggagagtacagaggtttttaccaagaaaaccaagctcacagaggaagagaaaaatcgcttgaactttcttaaaaagattagtcaacgctaccagaaatttgcacttccccagtaccttaagacagtgtaccagcaccaaaaggcaatgaagccttggatacagccaaagacaaaagtaataccctacgtgaggtatttg

SEQ ID NO: 320 - DNA, 666 bp, synthetic construct
  source 1..666: mol_type = other DNA
atgaaattttttattttcacctgccttttggcagttgccctcgcaaagaacactatggagcatgtcagtagttctgaggagtccataattagtcaagaaacatataagcaagagaaaaacatggctattaatccaagtaaggagaatttgtgtagcaccttttgcaaagaagtcgtgcgtaacgcaaacgaagaggaatactcaatcggcagctccagtgaggagagtgcagaggttgcaacagaagaagtcaaaataacagtagacgataaacactatcagaaggcactcaacgaaatcaaccagttttaccagaagtttccccagtatcttcaatacctgtatcaaggacctatcgttctcaacccctgggaccaggttaaacgcaatgctgtcccaatcaccccaacactcaatcgtgagcagttgtcaacttccgaagaaaacagtaagaagacagttgacatggaaagcactgaggtattcaccaaaaagacaaaacttactgaggaggaaaagaacaggctcaactttctgaaaaaaataagtcaacgttaccaaaagttcgccttgccacagtatctcaagactgtatatcagcaccaaaaggctatgaaaccttggatacaacctaaaactaaggtaattccctacgtaaggtatctc

SEQ ID NO: 321 - DNA, 666 bp, synthetic construct
  source 1..666: mol_type = other DNA
atgaaatttttcatattcacttgcctgttggccgtggctcttgctaaaaatacaatggaacacgtatcaagttctgaggagtctataatcagtcaagagacctataagcaagaaaaaaacatggctataaacccaagcaaggagaacctgtgttccacattctgtaaagaagtggtaaggaatgctaacgaagaggaatatagtattggatcttctagcgaagaatcagccgaggttgctacagaggaagttaagattaccgtggatgacaaacactaccaaaaagctctcaacgaaataaatcagttctaccagaagttccctcaatacctgcagtatctctatcaaggaccaattgtgctcaatccttgggatcaagtgaaacgcaatgccgttcctattacccccactcttaatcgcgagcagttgtcaaccagcgaggaaaattcaaagaagacagtagatatggaatctacagaggtattcactaaaaagacaaaactgaccgaagaggaaaaaaatcgcctgaacttcctcaagaagattagtcagagataccagaagtttgctttgcctcagtacctgaaaaccgtgtatcaacatcagaaggccatgaagccttggattcaacccaagacaaaggtgataccttacgtacgttatctt

SEQ ID NO: 322 - DNA, 666 bp, synthetic construct
  source 1..666: mol_type = other DNA
atgaagttttttatctttacctgtcttttggccgtagcactcgcaaagaataccatggagcacgtttcctccagtgaggaaagcattattagccaggaaacatataagcaggaaaagaatatggcaattaatccaagtaaggaaaacctgtgtagtacattctgtaaagaggtcgtcaggaatgctaatgaggaagaatatagcatcggaagttcttccgaagagtcagctgaagtagccacagaagaagtgaagattactgtcgatgataaacactaccagaaggctttgaatgagatcaatcaattctaccaaaagtttcctcaatacctccaatacctctaccaaggacccatagtgctgaacccatgggatcaagttaaaagaaacgccgtaccaatcacacctacattgaatcgcgagcagttgtccacctccgaggaaaactctaaaaaaactgtggacatggagtcaactgaagtttttactaagaaaaccaaattgaccgaggaggagaagaatcgtctgaatttcttgaagaagataagtcaacgctatcagaaattcgctcttcctcaatatctgaagaccgtttaccaacatcagaaggctatgaagccttggatacagcctaagaccaaagttattccctatgtccgttatctt

SEQ ID NO: 323 - DNA, 666 bp, synthetic construct
  source 1..666: mol_type = other DNA
atgaaattcttcattttcacctgtctcctcgccgtggcattggctaaaaacactatggagcacgtttcatcatctgaggaatctattattagtcaggaaacttacaaacaggaaaaaaacatggcaataaaccctagtaaagaaaatctttgcagcacattctgcaaggaggtggtcaggaacgccaatgaagaagagtattcaatcggatcttcctcagaagaatcagctgaggttgctactgaggaagtaaagatcactgtggacgataagcattaccaaaaggcccttaacgagattaaccaattctatcagaagttcccacagtatcttcagtatttgtatcaggggccaatagtgctcaacccctgggaccaagtaaaaagaaatgctgtgcccattacacccacccttaatagagaacagctgtctacttccgaggaaaattcaaagaaaaccgtggatatggaaagcacagaggtcttcactaagaagaccaaattgaccgaagaggagaagaacaggctcaacttcctcaagaagatcagtcagagatatcagaaattcgccctccctcagtatctcaagaccgtgtatcagcaccagaaggctatgaagccatggattcagcccaaaactaaggtcataccctatgttcgttatttg

SEQ ID NO: 324 - DNA, 666 bp, synthetic construct
  source 1..666: mol_type = other DNA
atgaagttcttcatttttacctgtctccttgcagtagctttggcaaaaaacacaatggagcatgtctcatcaagtgaggaatctatcattagccaggaaacttataagcaggaaaaaaatatggctatcaatccatcaaaggagaacctgtgttcaacattttgtaaggaagtcgttaggaacgcaaacgaagaagagtacagcattggaagtagtagcgaagaaagtgctgaagtcgcaacagaagaagtcaagatcactgtcgacgacaagcattatcaaaaggctctcaacgaaataaatcaattctaccaaaagtttccccaataccttcagtacctctaccagggtcctatcgtgttgaatccttgggaccaggtcaaaagaaatgctgttcctataactcctaccctcaaccgtgaacaactctctacctcagaagaaaatagcaaaaagacagtcgatatggaatccactgaagtcttcaccaaaaaaaccaaacttacagaggaggagaaaaacagacttaattttcttaagaagatttcacaaaggtaccagaagttcgccctccctcaatatctgaaaacagtataccagcatcaaaaagcaatgaaaccatggatccaacctaagacaaaagtaatcccttacgtgcgttatctc

SEQ ID NO: 325 - DNA, 666 bp, synthetic construct
  source 1..666: mol_type = other DNA
atgaagttcttcatttttacctgtctcttggcagtcgcactcgccaaaaatacaatggaacacgtttcttcatcagaagaaagtattatctcacaggaaacctacaaacaagagaagaacatggccattaaccccagtaaggaaaatctttgctcaactttctgcaaagaggtggtccgtaatgccaatgaagaagaatatagtataggaagttcctctgaagaatctgccgaggtggcaactgaggaggtaaagataacagtggatgataaacactaccagaaagcactcaatgaaataaatcaattctatcaaaagtttccacagtatcttcaatacctgtatcaaggtcctattgttctcaatccatgggatcaggtgaagcgtaacgcagtccctatcacacccactctcaatcgcgagcagctcagtacttccgaggaaaatagtaagaagactgtggatatggagtctaccgaggtcttcactaaaaagacaaagctcacagaagaagagaaaaataggctgaatttcctcaaaaagatcagccagcgttaccagaaatttgctcttcctcagtaccttaaaacagtctaccagcatcaaaaagccatgaagccatggatacagcccaagacaaaagtgattccttatgtgagatacttg

SEQ ID NO: 326 - DNA, 666 bp, synthetic construct
  source 1..666: mol_type = other DNA
atgaagttcttcatttttacttgcctcctcgccgtggcccttgccaagaatactatggaacacgttagttcatctgaggaatcaatcatctcccaggaaacttacaagcaagaaaaaaacatggctatcaaccccagcaaggagaacctttgcagtacattctgcaaggaggtcgtaaggaatgccaatgaagaagaatatagtattgggtcttcttcagaagaatccgccgaggtcgctacagaagaggtcaaaatcactgtggatgacaagcactatcagaaggcacttaatgagatcaaccagttttaccagaaatttccacagtatttgcagtacctctaccaaggtccaattgtgcttaacccttgggatcaagtaaaacgcaacgctgtccctattacacccaccctgaacagagaacagctctcaactagcgaggagaactcaaagaagaccgtggatatggagagtacagaagtattcacaaaaaaaaccaagctgactgaagaagaaaagaatagattgaatttcctcaaaaaaatttctcagcgttaccagaaattcgccctgcctcaatatttgaaaactgtctatcaacatcagaaagccatgaaaccatggattcaacccaaaactaaagtcataccatacgtgagatatttg

SEQ ID NO: 327 - DNA, 666 bp, synthetic construct
  source 1..666: mol_type = other DNA
atgaaatttttcatctttacctgcctcttggccgttgccctcgcaaaaaacacaatggagcacgtatcatcatctgaagaaagtataattagtcaggagacttacaaacaagaaaagaatatggcaatcaacccctccaaagagaatctgtgttccacattctgtaaggaagttgtcagaaatgccaacgaggaggaatatagtatcggctcaagttcagaggagtcagcagaagtggcaacagaagaagtaaaaattactgtggacgacaaacattaccaaaaggccctcaacgaaatcaatcaattttaccagaaatttccacagtatctgcagtacctgtaccaaggtcccatagtccttaacccttgggaccaggttaagcgtaacgcagtccctataactcctaccctgaatagagagcagctgtcaaccagcgaggagaactcaaaaaaaactgtggacatggaatcaaccgaggtcttcaccaaaaaaactaagctgaccgaagaagagaaaaaccgtcttaacttcttgaaaaagatcagtcagaggtaccaaaaatttgcccttccacaatatctcaagactgtgtaccaacaccagaaagctatgaaaccctggatacaacccaagaccaaagtcattccttatgttcgctacctc

SEQ ID NO: 328 - DNA, 666 bp, synthetic construct
  source 1..666: mol_type = other DNA
atgaagttctttatctttacctgcctccttgctgtagccttggccaaaaacactatggaacatgtctcatcaagcgaggagtccattatctcccaagaaacttataaacaggaaaaaaatatggccatcaatccctccaaagagaacctctgtagcactttttgcaaagaagtcgttcgcaatgcaaacgaagaagaatacagcattggtagctcctccgaagagtccgctgaggtcgcaaccgaagaggtcaagataaccgtagatgataaacattatcagaaagcacttaatgaaataaaccagttctatcagaaatttcctcagtacctccaatacctctatcaggggcctattgtccttaacccatgggaccaggttaaaaggaatgcagttcccataacccctacacttaacagggaacagttgtccacctccgaagagaactctaaaaaaaccgtggacatggaaagtacagaggtcttcaccaagaagacaaagctgaccgaagaagagaagaacaggttgaatttccttaaaaaaatcagccaacgctaccaaaaatttgcactcccccagtatctcaaaactgtatatcaacatcaaaaagccatgaaaccatggatacaacccaaaacaaaggttattccctatgtccgttatctc

SEQ ID NO: 329 - DNA, 666 bp, synthetic construct
  source 1..666: mol_type = other DNA
atgaaatttttcatatttacttgcctcttggctgttgctctcgccaagaacacaatggagcacgtatccagttccgaggaatccatcataagtcaggagacctacaagcaagagaaaaacatggctattaaccccagtaaagaaaatctctgctcaactttctgtaaggaagtcgtgagaaacgccaatgaggaggaatattctattggtagctctagcgaagagtccgccgaggtagccaccgaggaagtaaagatcaccgttgacgataagcactatcagaaggctctcaatgaaataaaccagttttaccagaaatttccacagtacttgcagtacctctatcagggtccaatagttcttaatccttgggatcaagtaaagaggaacgccgtcccaattactcctacactgaatagggaacaattgtctacttccgaagagaactctaaaaagacagttgacatggagagtactgaggtattcactaaaaaaaccaagttgactgaggaagaaaagaatcgcctgaactttctcaaaaaaattagccaaagataccagaagttcgccttgccccagtacttgaagactgtgtatcaacatcagaaagcaatgaagccttggattcagcccaagactaaggtcataccttacgtaagatacctc

SEQ ID NO: 330 - DNA, 666 bp, synthetic construct
  source 1..666: mol_type = other DNA
atgaaattctttatcttcacttgtcttttggctgtggccttggcaaaaaatacaatggagcatgtgagtagtagcgaagaatccataatctcacaggaaacttacaagcaggagaaaaacatggcaatcaacccaagtaaagagaacttgtgctccaccttttgtaaggaagtagtgagaaacgccaatgaggaagaatatagtataggctcttccagtgaagaaagcgccgaggttgctacagaagaggtgaaaataactgttgatgacaaacactaccaaaaggctcttaacgagatcaatcaattctatcaaaagttcccacaatatcttcaatacctttaccaaggacccatcgttcttaatccatgggaccaagtaaagcgcaacgcagtacccataaccccaacactcaatcgtgaacagcttagcacatcagaagagaacagcaaaaagactgtcgatatggagagcacagaagtgttcacaaagaaaactaaactgactgaagaggagaaaaacagattgaacttcttgaagaaaatttcacaacgctatcagaagttcgcactgccacaatatttgaaaactgtttatcaacaccaaaaggccatgaagccctggatacagcctaaaacaaaagtgattccttacgttcgttatctc

SEQ ID NO: 331 - DNA, 666 bp, synthetic construct
  source 1..666: mol_type = other DNA
atgaaattttttatatttacttgtttgctcgcagtcgccttggcaaagaatacaatggagcacgtttcatcatctgaagagtcaataattagtcaagaaacttacaaacaggagaaaaatatggctataaatccttcaaaggaaaacctttgctccaccttctgtaaggaggttgttagaaacgctaatgaagaggaatattccatagggtcctccagtgaagagagtgcagaggttgccactgaagaggtcaaaatcacagtagacgataagcactaccagaaggctctgaacgagattaatcagttctaccagaaattccctcagtacctgcagtatttgtaccaaggcccaatcgtgctcaatccatgggaccaggttaaacgcaacgccgtaccaattaccccaaccctcaaccgtgagcaactttcaacttcagaggaaaactctaagaagactgttgatatggaaagcactgaagtattcacaaagaaaactaagctgacagaagaggagaaaaaccgccttaattttttgaagaaaatatctcagagataccagaagttcgcactcccccagtacctgaaaactgtttaccaacatcagaaagcaatgaaaccatggattcaacctaaaacaaaagtgattccctatgtacgctatctt

SEQ ID NO: 332 - DNA, 666 bp, synthetic construct
  source 1..666: mol_type = other DNA
atgaaattctttatatttacatgcctcctggctgtggctctcgccaaaaacactatggaacacgtcagctcatcagaagaaagtatcatttcacaagagacttacaagcaagagaaaaatatggctatcaatccctccaaagaaaatctttgttcaactttttgcaaagaggtcgtaaggaacgccaatgaagaggagtactctataggttcctcatcagaggaaagtgctgaggttgcaaccgaagaggttaaaataactgtggatgataagcattaccagaaagcccttaatgagattaaccagttttaccagaagttccctcagtatctccaatatctttaccaaggacctatcgtcctcaatccatgggaccaagtgaaaagaaatgcagttcctattacccctacccttaatcgcgagcagttgtcaacatcagaggagaactcaaaaaaaacagtagacatggaaagcacagaggtctttactaagaagaccaagttgacagaggaagagaaaaaccgtctgaactttcttaaaaagatcagccagcgttaccaaaagttcgcacttccccaataccttaaaaccgtttatcagcatcaaaaggctatgaaaccttggattcagccaaaaaccaaagtcattccttatgtacgttatctg

SEQ ID NO: 333 - DNA, 666 bp, synthetic construct
  source 1..666: mol_type = other DNA
atgaagttctttattttcacctgccttcttgccgtagcccttgccaaaaacacaatggaacacgtcagttctagcgaagaaagtatcatctcacaggaaacctataagcaggaaaagaacatggcaatcaacccctcaaaagaaaatttgtgtagtaccttctgcaaagaggtcgtcagaaatgccaatgaggaggagtacagcatagggtctagttcagaagagtctgctgaagtggcaaccgaggaggttaagatcaccgtcgatgataagcactaccaaaaggccttgaacgagataaaccagttctatcaaaagtttccccagtacctccagtatctgtatcagggtcccattgttcttaatccctgggaccaagttaagcgcaacgcagttcctatcactcctactcttaatagagaacaactctcaaccagtgaggagaactcaaagaagaccgtagacatggagtctaccgaggtttttaccaagaagacaaaactcaccgaagaggaaaaaaatcgcctgaatttcctcaaaaagatctcccagcgttatcaaaagttcgcactccctcaatatctgaagactgtctatcaacatcaaaaagcaatgaaaccatggattcagcctaaaactaaagtcataccatatgtgagatatttg

SEQ ID NO: 334 - DNA, 666 bp, synthetic construct
  source 1..666: mol_type = other DNA
atgaaattcttcatttttacatgtctcctggctgtcgctcttgcaaaaaacacaatggaacacgtctcatcttccgaagaatctatcataagccaggaaacatacaaacaggaaaagaatatggccatcaacccttctaaagagaacctttgctccactttttgcaaagaggtcgtgcgtaacgcaaacgaagaggaatatagtatcgggtctagctctgaggagagcgctgaagtagcaaccgaggaggtgaaaatcaccgttgacgacaagcattaccagaaagccttgaatgagataaaccagttttaccagaaatttccacaatatctccaatacctttaccaagggcctattgtcctcaatccttgggaccaggtgaaaagaaacgcagtcccaattacccctacactgaaccgcgaacaactctccacatctgaggaaaactctaaaaagactgtggatatggagtcaaccgaagtcttcactaagaagaccaaattgacagaggaggaaaaaaataggttgaacttcttgaaaaagatatcccaaagataccaaaagttcgcactccctcaatacttgaagactgtttatcagcatcaaaaggcaatgaaaccatggatacagccaaaaactaaggtcataccttatgtgcgctatctc

SEQ ID NO: 335 - DNA, 666 bp, synthetic construct
  source 1..666: mol_type = other DNA
atgaaattcttcatttttacctgtctgcttgcagtagcactcgctaagaatactatggagcacgtgtcctcctctgaagagagcataatttcccaggagacatataaacaggagaagaacatggcaataaacccatctaaggagaacttgtgttctacattttgtaaggaggttgtgcgcaacgccaacgaggaggagtatagcatcggctcctcctcagaagaatcagcagaggtagctaccgaagaagtgaaaatcactgtggatgacaaacactatcaaaaggccctgaatgaaataaaccagttttatcagaaattcccacagtacctgcaatatttgtatcagggtcctatagttttgaacccatgggaccaggttaagcgcaacgcagttccaataacacctacccttaacagagagcagttgtccacctccgaagaaaactccaagaaaacagttgatatggaatccacagaggtattcacaaagaaaaccaaattgaccgaagaggaaaaaaacaggttgaattttctcaagaaaatttctcaaagataccagaagtttgcactgccacagtaccttaagacagtttaccaacaccagaaggccatgaagccttggatacaaccaaagaccaaggttataccatacgttcgctacttg

SEQ ID NO: 336 - DNA, 666 bp, synthetic construct
  source 1..666: mol_type = other DNA
atgaaattctttattttcacatgtctgttggctgtcgctttggcaaaaaataccatggagcatgtctcaagcagtgaagagtctatcatcagtcaggagacctataaacaggaaaaaaatatggctatcaatcctagtaaagagaatttgtgctctactttctgtaaagaggtagtccgtaatgcaaacgaagaggaatattccataggcagttcctctgaggaatctgctgaagtagccacagaggaggttaaaatcacagtcgatgacaagcattatcagaaggctcttaatgaaataaaccaattctaccagaagttcccccagtatctgcaatatctctatcaaggcccaatcgttctgaatccttgggaccaggttaagaggaacgccgtacccattactccaactttgaaccgcgagcagctgagcaccagtgaggagaactctaaaaaaacagtggacatggaatccactgaagttttcactaaaaagaccaaacttactgaggaggaaaaaaacaggcttaattttctcaaaaaaatctcccaaaggtatcaaaagtttgctttgccccaatacctgaaaacagtatatcagcatcagaaggctatgaagccatggattcagcccaaaaccaaggtgataccttacgtcagatacttg

SEQ ID NO: 337 - DNA, 666 bp, synthetic construct
  source 1..666: mol_type = other DNA
atgaagtttttcatcttcacctgtttgctcgccgtagcacttgcaaaaaatactatggaacacgtatcttcaagtgaagagtcaattatttcccaggaaacatataagcaggaaaaaaacatggctatcaacccttcaaaggagaacctttgtagtaccttttgcaaagaagtcgttaggaacgcaaacgaagaagaatactctataggaagctcatccgaagaaagtgcagaagttgcaaccgaagaagttaaaataactgtggacgataagcattatcaaaaggccttgaatgagattaaccaattctaccaaaaatttccacagtatctccagtacctctaccaaggacccattgttctgaatccatgggaccaggttaagagaaatgctgttcccattaccccaactctcaacagagagcagttgtcaacatctgaagaaaacagtaaaaagactgtggatatggagtctaccgaggtctttacaaagaagacaaagttgaccgaggaagagaagaatcgtttgaactttcttaaaaagatatctcaacgctaccagaagtttgcacttcctcagtatttgaaaactgtatatcagcatcaaaaggccatgaaaccttggatacagccaaagaccaaggtgataccctacgtgagatacctc

SEQ ID NO: 338 - DNA, 666 bp, synthetic construct
  source 1..666: mol_type = other DNA
atgaagttcttcatcttcacatgcttgctggcagtagctctggcaaaaaacactatggagcacgtttctagttccgaggagtcaatcataagccaggaaacttacaagcaggagaaaaacatggcaattaacccctctaaagagaacctgtgttcaactttctgcaaggaagtagttcgtaatgctaatgaggaggagtactcaattggttcatcttctgaggagtccgccgaagtagcaactgaagaggtcaaaataacagtcgatgacaaacactaccaaaaggcattgaacgaaattaatcagttttatcagaagtttccacagtatcttcaatatctctatcaaggtccaattgttttgaatccttgggaccaggttaaaagaaatgctgtgcctataactcctaccctcaacagggagcagctcagtacatccgaggaaaactctaagaaaacagtagacatggagtccacagaagtatttacaaaaaagaccaagttgacagaagaagagaagaaccgtttgaattttttgaagaaaattagccaacgctatcagaagttcgccctccctcaatacttgaagacagtatatcaacatcaaaaggccatgaaaccatggattcaacccaagactaaagttataccatatgtaaggtatctt

SEQ ID NO: 339 - DNA, 666 bp, synthetic construct
  source 1..666: mol_type = other DNA
atgaagttttttatattcacttgtctccttgcagtggctctcgcaaaaaatacaatggagcacgtttcatcctccgaagaatctataataagtcaagaaacttataaacaggagaaaaacatggctatcaacccctcaaaagaaaacttgtgctcaacattttgcaaagaagtggtacgcaatgctaatgaggaagaatactctattggatcctcatctgaggaaagtgccgaggtcgctacagaggaggtcaagatcaccgtggatgataagcattatcagaaggcactcaacgaaataaatcagttttatcaaaagtttccccagtatttgcaatacctctatcaaggtcccatcgtattgaatccctgggaccaagttaagaggaacgccgttccaattacccccacccttaaccgcgaacaattgtctactagcgaagaaaattctaaaaagactgtggatatggagtcaaccgaggttttcactaagaagactaagctcaccgaggaggaaaagaaccgtttgaatttcctgaaaaagatatctcaacgttaccagaaattcgcccttccacaatacctgaagaccgtttaccagcaccagaaagcaatgaaaccctggatacagcccaaaactaaggtgattccctacgtcaggtatctt

SEQ ID NO: 340 - DNA, 666 bp, synthetic construct
  source 1..666: mol_type = other DNA
atgaaatttttcattttcacctgtcttctggccgtagcattggccaaaaacacaatggaacatgtgtccagtagtgaagaaagcataatcagccaggaaacatacaaacaggaaaagaatatggctattaacccctccaaggaaaatctctgttccacattctgcaaggaagtagtacgcaatgccaacgaggaggagtactctatcgggtcaagttctgaagagagcgctgaggtagctactgaagaggttaaaatcacagtggacgacaaacactatcagaaagcactcaacgaaataaaccaattctatcaaaaatttcctcaataccttcagtacctgtaccagggtccaatcgtgttgaatccttgggatcaggtcaaacgtaatgctgtgccaattactcccaccctcaacagagaacaactttctacatcagaggaaaacagtaagaaaactgtcgatatggagagcactgaggtgttcaccaaaaagaccaagctcacagaggaagagaaaaacaggttgaactttcttaaaaaaattagtcagaggtatcaaaaattcgcactgccccaatatctcaagacagtgtaccagcatcaaaaagccatgaagccttggattcaacccaaaaccaaagtaattccctacgtcagatacctt

SEQ ID NO: 341 - DNA, 666 bp, synthetic construct
  source 1..666: mol_type = other DNA
atgaagttcttcatttttacctgtttgcttgcagtagctctggcaaaaaacaccatggagcatgtgagtagtagtgaagaatctataatctcacaggagacctacaaacaagagaagaacatggccataaaccccagcaaggagaacttgtgtagcacattttgcaaagaggttgtacgcaacgccaacgaggaggaatattcaatagggagtagctccgaagaaagtgcagaggtagccaccgaggaagtcaagatcacagtcgatgataagcactaccaaaaagcattgaacgaaattaaccaattctaccagaagtttcctcagtatctgcagtatctgtatcaaggtcccatcgtgcttaatccttgggaccaggttaagcgtaacgctgtcccaataactcccaccctcaaccgcgaacaacttagcacatcagaggagaattcaaagaagacagtagatatggagtctactgaggtgtttaccaaaaaaacaaagttgaccgaagaagagaaaaatagactgaattttttgaagaagatttctcaacgttaccaaaaattcgcccttccccaatatctcaagacagtgtatcagcaccaaaaggccatgaaaccatggatacaacccaaaaccaaagtcattccctacgttcgctatctc

SEQ ID NO: 342 - DNA, 666 bp, synthetic construct
  source 1..666: mol_type = other DNA
atgaagtttttcatttttacatgtctccttgccgtagctttggctaagaacaccatggaacacgtttcctcatcagaagagagtattattagccaagagacatataagcaagaaaagaacatggctataaatccatctaaggagaacttgtgtagtactttctgcaaagaggttgtccgcaacgccaatgaagaagagtatagtattggcagctctagtgaagagtccgctgaagtagctaccgaagaagtcaaaattaccgtagacgataaacattaccaaaaggcccttaatgaaataaaccagttctaccagaagtttcctcagtatctccagtatttgtaccaagggcctatcgtactgaatccttgggatcaggtgaagcgtaatgcagtacctataactccaacacttaatagggaacagctttcaacctctgaagaaaacagcaaaaaaaccgttgacatggaaagcaccgaagtatttacaaaaaaaaccaagttgactgaagaagagaagaatcgcttgaatttcctgaaaaaaatatcccagaggtaccaaaaattcgcactgccacaatatctcaagactgtgtatcaacaccagaaggctatgaagccatggattcagcccaaaactaaagtcataccatacgtgagatacctc

SEQ ID NO: 343 - DNA, 666 bp, synthetic construct
  source 1..666: mol_type = other DNA
atgaagttttttatatttacctgtctgttggctgtggcacttgccaagaacaccatggaacacgtaagctcttctgaagagtcaataatttctcaggagacttacaaacaggaaaaaaatatggctataaaccccagtaaggagaatttgtgtagcaccttttgcaaagaagtggttaggaacgcaaatgaggaagaatactctattggttcatcttctgaagaatcagccgaagttgctaccgaggaagttaaaattaccgtggacgataagcactatcaaaaggcactcaatgaaataaatcaattctaccaaaagttcccacaatatctccaatatctgtaccaaggtcctatcgttcttaatccatgggatcaagtcaaaaggaacgcagtacccatcactcccaccctcaacagagaacaactgtctacctctgaggagaacagcaagaagaccgtggatatggaaagcacagaggtctttactaaaaaaaccaagttgaccgaggaagagaagaatcgcctcaatttccttaagaaaattagccaaaggtatcaaaaatttgctttgcctcagtatttgaagactgtttatcagcaccaaaaagctatgaagccttggatccagccaaaaaccaaagtaataccttacgtgcgttacctc

SEQ ID NO: 344 - DNA, 666 bp, synthetic construct
  source 1..666: mol_type = other DNA
atgaagttcttcatattcacttgtctcctggccgtcgcacttgccaagaatactatggaacacgtcagttcctccgaggaaagcattattagccaagagacctataagcaggagaagaacatggccataaatcctagcaaagaaaatctgtgttctacattttgtaaggaagttgttaggaatgctaacgaagaagaatatagtataggcagctcatccgaagagtctgccgaagtggcaaccgaagaagtgaagataactgttgacgacaaacattaccaaaaggctctgaatgaaataaaccagttttaccaaaaatttcctcagtatctccaatacctctaccaagggccaattgttcttaacccttgggaccaagtcaaaaggaacgctgtgcccatcacccccactctcaatcgtgaacaattgtcaacatccgaagaaaatagcaagaagactgttgacatggagtcaaccgaggttttcaccaagaagactaagttgaccgaggaggaaaagaaccgccttaatttcttgaagaagatctctcaaagataccagaaattcgcccttccccagtatctcaagactgtgtatcaacatcaaaaggccatgaaaccttggatccagccaaaaaccaaggtcatcccctatgttcgttatttg

SEQ ID NO: 345 - DNA, 666 bp, synthetic construct
  source 1..666: mol_type = other DNA
atgaagtttttcatcttcacatgcttgctcgccgtagctttggccaaaaataccatggagcatgttagtagcagcgaagaatccatcatttctcaagagacctacaaacaggaaaagaatatggctatcaatccctcaaaagaaaatctttgctctactttctgcaaagaagtggtaagaaatgctaatgaagaagaatattcaataggaagctcaagtgaggagtctgccgaggtagcaactgaagaagtgaagataacagtagatgacaagcattatcagaaggccctcaatgagatcaatcagttttatcaaaaattccctcaatacctgcagtatctttatcaggggcccattgtgctgaatccatgggaccaggttaaacgtaacgcagtccctatcacaccaactctgaatcgtgaacaactctcaaccagtgaagaaaactccaagaaaactgttgacatggaatcaacagaggtgttcaccaagaagactaaactgaccgaggaggagaaaaatcgcctgaactttcttaaaaaaatttctcaacgctaccagaaattcgcattgccccaataccttaaaacagtgtaccagcatcaaaaggctatgaagccctggattcagcctaagactaaagttatcccctacgtgcgttacctc

SEQ ID NO: 346 - DNA, 666 bp, synthetic construct
  source 1..666: mol_type = other DNA
atgaaattctttatatttacatgcctgcttgctgtggccctggctaagaataccatggagcatgtttcttcctcagaagaaagcataatatcccaagagacttacaagcaagaaaaaaatatggcaattaacccatccaaggagaacctctgcagcactttttgcaaagaggttgtacgcaatgcaaacgaggaggagtattccattgggtcatcctcagaagaatccgccgaagtagccactgaagaagtgaagatcactgtcgacgataaacactaccagaaggcccttaatgaaatcaatcagttctaccaaaagttcccccaatatctgcaatatctgtaccagggtccaatcgtactcaacccctgggaccaggtaaagagaaacgcagtgcccatcaccccaacattgaacagagagcaattgagtacttcagaggagaattctaagaaaaccgtggacatggagagtaccgaggtttttacaaaaaaaacaaaactgaccgaagaagaaaagaacagattgaattttctcaaaaagatttcacaaaggtaccagaagtttgccttgccccaatatctgaaaaccgtatatcagcaccagaaagccatgaagccttggattcaacccaaaaccaaggtcataccctacgtgcgttacctt

SEQ ID NO: 347 - DNA, 666 bp, synthetic construct
  source 1..666: mol_type = other DNA
atgaagtttttcatatttacctgtctgctcgctgtcgcactcgctaagaacaccatggaacatgtgtcatccagtgaggaatctatcataagccaggaaacatacaagcaagaaaaaaacatggctatcaacccttcaaaagaaaatttgtgtagcaccttctgcaaggaggtcgtgagaaatgccaacgaggaggaatatagcatagggagtagttctgaggaaagtgccgaagttgctactgaggaggttaagattaccgtcgacgataaacactaccagaaagcactcaatgaaataaaccagttttatcagaaattccctcagtacctccaatatctttatcaagggccaatcgtcttgaacccctgggatcaggtcaagcgcaacgctgtgcctattactcctacattgaatcgtgaacagctttctacctccgaagagaacagtaaaaagaccgtcgacatggagagcactgaggtttttacaaagaaaactaaacttaccgaggaggaaaagaacaggctgaacttcctcaaaaagataagccaacgctaccagaaattcgctttgccacaatatctcaaaactgtttatcagcaccaaaaggcaatgaagccttggatccagccaaagactaaagtcattccatatgttcgctatctt

SEQ ID NO: 348 - DNA, 666 bp, synthetic construct
  source 1..666: mol_type = other DNA
atgaaattttttattttcacctgccttctcgcagtcgcacttgctaagaatactatggaacacgtatccagtagtgaggagtccattatctctcaagagacatacaagcaggagaaaaatatggctattaacccatcaaaggaaaacctgtgttccaccttttgcaaggaagtcgtacgtaacgcaaacgaggaggaatactctatcggctccagttcagaagaaagtgccgaggtagcaacagaggaggtgaagataacagtggacgacaagcattaccaaaaagccctcaatgaaatcaatcagttctatcaaaaatttccacaatatcttcaatacttgtatcaagggcctatcgtactgaacccatgggaccaagtaaagcgtaatgccgtgcccatcactcccaccctcaatagggagcagttgagtacaagtgaagaaaattccaagaaaactgttgacatggaaagcacagaggtatttaccaaaaagaccaaacttacagaagaagaaaagaacaggctgaatttcctcaaaaagatcagccaaaggtatcaaaagttcgctttgccccaatatctcaagactgtctatcagcaccaaaaagcaatgaaaccttggatacagccaaagactaaggtaatcccttacgtgcgctatttg

SEQ ID NO: 349 - DNA, 666 bp, synthetic construct
  source 1..666: mol_type = other DNA
atgaagttcttcattttcacttgtctcctggctgtggctcttgctaagaatactatggagcatgtctcaagctccgaggagtcaattatcagtcaggagacctacaaacaggaaaagaacatggcaataaatcctagcaaggaaaatttgtgctcaacattctgtaaggaggtagttaggaacgcaaacgaagaagagtactctatcggctccagtagcgaagaaagtgcagaagtcgcaacagaggaggtaaaaatcactgttgacgataaacactatcagaaggccctcaacgagataaatcaattctaccagaagtttccccagtacctccagtatctctaccaaggccctatcgtacttaatccttgggatcaggtcaaaaggaatgccgtaccaataactccaactcttaaccgtgaacaactctctaccagcgaagagaattctaagaaaactgtagacatggagtccaccgaagtctttacaaagaaaaccaagctcactgaagaggaaaagaaccgtctgaactttcttaagaagataagccaacgctatcaaaagtttgcattgccacaataccttaaaaccgtttatcaacaccagaaggccatgaaaccatggattcagcccaaaactaaagtaatcccatatgtgaggtatctg

SEQ ID NO: 350 - DNA, 666 bp, synthetic construct
  source 1..666: mol_type = other DNA
atgaaattcttcatcttcacatgcctcttggctgtggctcttgcaaagaacacaatggagcacgtttccagcagcgaagaatcaattatatcacaagagacctacaaacaggagaagaacatggccattaacccaagtaaggagaacctctgcagtacattttgtaaagaagttgtaagaaatgctaatgaggaagaatactccatcgggtcttcttcagaagaatctgccgaggtcgctactgaggaggtcaaaatcaccgtggatgacaagcactaccagaaggcattgaatgagattaaccagttttaccagaaatttcctcagtatcttcaatatctgtatcagggtcccatagtcttgaacccttgggatcaagtgaagagaaacgcagtgcccattactcctacactgaatagagaacagttgtcaacatctgaagagaactcaaagaaaacagttgacatggagtctactgaagtgttcactaagaaaaccaaacttacagaggaagaaaaaaacaggctgaatttcttgaagaaaatctcccagaggtatcagaaatttgccctcccacagtacctgaagacagtttaccagcatcaaaaggctatgaaaccctggatacaacctaaaaccaaagtgataccatatgtaaggtatctt

SEQ ID NO: 351 - DNA, 666 bp, synthetic construct
  source 1..666: mol_type = other DNA
atgaagttctttatattcacatgtctgctcgccgtggctttggctaaaaacacaatggaacacgtcagcagctcagaggagtctatcattagtcaggagacctataaacaggaaaaaaatatggctatcaaccccagcaaagagaacctgtgtagcacattttgcaaggaagtcgttcgcaatgcaaacgaggaagaatactccattggttcttctagcgaagagtccgctgaagttgcaactgaggaagtcaagataactgtcgacgataagcattatcagaaggctttgaacgagatcaatcaattctatcagaagttccctcagtatctgcaatacctctaccaaggacctatcgttcttaacccatgggaccaggtaaagcgcaatgctgttccaatcactcccactcttaaccgcgagcagcttagtacttcagaggagaactctaagaagacagtggatatggagtccacagaggttttcactaagaagaccaaactgacagaggaagaaaaaaacaggttgaacttccttaaaaagatttcccagagataccagaagtttgcacttccccagtacctgaagacagtatatcaacaccagaaggccatgaagccctggattcagcccaagactaaagtcataccttatgttcgttacctc

SEQ ID NO: 352 - DNA, 666 bp, synthetic construct
  source 1..666: mol_type = other DNA
atgaaattcttcatcttcacttgtcttctcgccgttgcccttgctaagaatacaatggagcacgtgtccagcagtgaggagtcaattatatcacaagaaacctacaagcaagagaagaacatggctatcaatccatctaaggagaacttgtgttctaccttctgtaaggaagttgtacgcaacgccaatgaagaagagtactctattggatctagttctgaagagtccgccgaagttgccactgaagaggtaaagatcactgtagacgacaagcattaccaaaaagctctgaatgaaataaatcaattttaccaaaaattcccacagtacttgcagtacctgtaccagggaccaattgtattgaacccatgggaccaggtaaaacgtaacgcagtacccattacacccacccttaaccgtgaacagctgtccacatctgaggagaactctaagaagaccgtcgacatggagagtacagaagtatttaccaagaagacaaagctcacagaggaggagaaaaataggctcaacttcttgaaaaagattagccaaaggtatcagaagttcgccctgcctcaatatctgaaaactgtctatcagcaccagaaggccatgaagccatggattcaacccaaaacaaaagtgataccatatgttagatacctt

SEQ ID NO: 353 - DNA, 666 bp, synthetic construct
  source 1..666: mol_type = other DNA
atgaagttctttatctttacctgtttgctcgcagtggcactggcaaaaaacactatggagcatgtgtctagtagtgaagagtcaattattagccaagaaacttataaacaggaaaagaatatggcaataaacccctccaaagagaatttgtgtagcacattttgcaaagaagttgtaaggaatgcaaatgaggaggaatattcaatcgggtcttccagcgaagagagcgcagaagtagctacagaggaagtcaagattaccgtagatgacaagcactaccagaaagctctgaacgaaataaatcaattttatcaaaaatttccccaatatcttcagtatctctaccagggtcccatagtcttgaatccttgggaccaagtaaaaaggaacgccgtacctattacccctactcttaatcgtgaacagctcagcacatccgaggagaattcaaaaaagactgtcgatatggagtccacagaagtctttacaaagaagactaaactgaccgaggaagaaaaaaacaggttgaactttttgaagaaaataagccaaagataccagaaattcgctttgccccagtatctgaaaacagtttaccaacaccagaaggctatgaaaccctggattcaacccaaaactaaggtcataccttatgtgaggtacctg

SEQ ID NO: 354 - DNA, 666 bp, synthetic construct
  source 1..666: mol_type = other DNA
atgaaattctttatctttacctgcctcctcgctgtcgctctggctaaaaataccatggaacacgtctctagctcagaagaatcaatcatctcccaggaaacctataaacaggaaaagaatatggcaatcaacccctcaaaggaaaacctgtgctccaccttttgtaaggaggtagttagaaatgcaaatgaagaagagtattctatcggtagctcttccgaggaatcagctgaagttgccactgaggaagtcaaaataacagtggacgacaaacactaccaaaaagcacttaatgagataaatcaattctatcagaaattccctcagtaccttcagtacttgtaccaaggaccaatcgtgcttaacccttgggatcaagttaagcgcaacgctgtaccaattacccccactctgaaccgcgagcagttgtcaacatcagaggagaatagcaagaaaaccgttgacatggaatctactgaggtgttcactaagaagacaaaactgacagaagaggaaaaaaatcgtctcaatttcctgaagaagatctctcagagataccaaaagtttgcactgcctcagtatttgaagactgtttaccaacatcaaaaggctatgaagccctggatacaacccaagactaaggttataccatatgttcgctatctc

SEQ ID NO: 355 - DNA, 666 bp, synthetic construct
  source 1..666: mol_type = other DNA
atgaaattcttcatctttacatgtctcctggctgtcgcattggcaaaaaacactatggagcacgtctcaagttcagaagaaagtataatatcccaagaaacttataagcaagaaaagaacatggctatcaatccctccaaggagaatctgtgttctactttctgcaaggaagttgtgaggaatgccaatgaggaagagtattcaattggatcttcctcagaggaaagtgctgaggtagccaccgaagaggtaaaaatcactgtggacgacaagcattaccagaaggctcttaacgaaataaatcagttctaccagaaattccctcagtacttgcaatatctctaccaggggcctattgtactcaatccctgggatcaggtcaaaaggaatgccgtgcccataacacctaccctgaatagagagcaactcagcacaagtgaggaaaattccaagaaaacagtggatatggaatctaccgaggtatttaccaaaaaaaccaaactcactgaagaggaaaaaaatagactcaatttccttaagaagatcagtcagagataccaaaagtttgcacttccccaatatcttaaaactgtttaccagcatcaaaaggcaatgaaaccctggattcagccaaagaccaaggtcattccttacgtgagatacttg

SEQ ID NO: 356 - DNA, 666 bp, synthetic construct
  source 1..666: mol_type = other DNA
atgaaattcttcattttcacatgcttgctggctgtggcacttgctaaaaacaccatggaacacgtctcttcaagtgaagagagtataatttcccaagaaacatacaaacaggaaaagaacatggccatcaacccaagcaaagagaacctctgttccactttctgtaaggaggtggttcgtaacgccaacgaagaagagtatagcatcggtagcagttccgaagaatctgctgaagtagccacagaggaagtgaagattactgtggacgacaagcattatcagaaggctttgaatgaaatcaaccagttttatcagaaattcccacagtatcttcaatacttgtatcaggggcctattgtgctcaacccttgggatcaagtcaaaagaaacgccgtacccatcactccaacactgaacagggaacagctctccacaagcgaggagaactcaaagaagactgttgacatggagtcaaccgaagtttttacaaaaaagactaaacttacagaagaagagaaaaacagactgaatttcctcaagaagatatctcagcgttaccagaaattcgctctgcctcaatatttgaagacagtatatcaacatcagaaggctatgaagccatggatacagcccaaaaccaaggttattccctacgttcgttacctg

SEQ ID NO: 357 - DNA, 666 bp, synthetic construct
  source 1..666: mol_type = other DNA
atgaaatttttcatatttacctgtctgctggccgtcgcccttgcaaagaacactatggagcacgtatctagtagcgaagaatccattatcagccaggaaacatacaagcaggaaaagaacatggctataaatccaagtaaggaaaatttgtgtagcactttctgcaaggaagtcgtaaggaatgcaaatgaagaggaatattcaatcggttcctcatctgaagagtccgctgaagtggctactgaggaagtaaagataacagtcgacgataaacactaccagaaggcacttaacgaaatcaatcaattctaccagaagttccctcagtatctgcaatatctctatcaaggacctatagttttgaacccctgggaccaagtcaaacgtaatgcagtccccataacccccacattgaacagggaacaactgtccacatcagaggagaattctaagaaaacagttgacatggaaagtactgaagtgtttacaaagaaaactaagttgacagaggaagagaagaacagacttaactttctcaagaaaatatcacagagataccaaaaatttgcactcccccaatatctgaaaaccgtgtatcaacaccaaaaggccatgaagccatggatacagccaaagactaaagtcatcccttacgtgcgctatctc

SEQ ID NO: 358 - DNA, 666 bp, synthetic construct
  source 1..666: mol_type = other DNA
atgaaatttttcatattcacttgcctcctcgccgtagcacttgccaaaaataccatggaacacgtttcatcctcagaggagtccattatttcacaagaaacctataagcaggagaaaaatatggccataaatccaagcaaggagaacctctgcagtactttttgcaaggaagtagtgagaaacgccaatgaggaagagtactccattggtagttcatctgaagagagcgcagaggttgcaacagaagaggtcaagataaccgtagatgacaaacattaccagaaagcactcaatgaaataaatcagttctatcagaaatttcctcaatatctgcaatacctgtaccagggaccaattgtgctcaacccatgggatcaggtcaaacgtaacgctgtgcccattacacctaccttgaaccgtgaacagttgagcacctccgaagagaacagcaagaagaccgtagatatggaatcaaccgaagttttcacaaaaaaaaccaaattgacagaggaggagaaaaacagactgaatttcttgaaaaagatcagtcagaggtatcaaaaattcgctctgccacagtatctcaagacagtctaccaacaccaaaaggcaatgaagccttggatccaacccaaaactaaagttatcccttacgtccgctatctg

SEQ ID NO: 359 - DNA, 666 bp, synthetic construct
  source 1..666: mol_type = other DNA
atgaagttcttcatcttcacctgtctgcttgccgttgccctcgcaaaaaatacaatggaacatgtaagctcctctgaagagagcatcattagccaggaaacatacaaacaagagaagaatatggcaatcaaccccagcaaagaaaatttgtgtagcaccttttgcaaagaggtggtaagaaacgccaacgaggaagaatactctatcggctccagttctgaggagagtgcagaagtcgctacagaggaggttaagattactgtggatgataagcactaccaaaaagcactgaacgaaatcaatcagttctaccagaagttccctcaatatcttcaatacctctaccaaggtccaatagttcttaatccttgggaccaggtcaaaagaaacgccgtacccattaccccaacactgaatcgtgaacaacttagcacaagtgaagaaaactccaagaagactgtggatatggagagtaccgaagtatttaccaaaaagactaaactcacagaagaagaaaagaatcgccttaattttctgaaaaagatttctcagaggtatcagaaattcgctctgccccaatacctgaagactgtgtaccaacatcagaaagcaatgaaaccttggatccaacccaaaaccaaagtaatcccctatgttcgctatctt

SEQ ID NO: 360 - DNA, 666 bp, synthetic construct
  source 1..666: mol_type = other DNA
atgaaatttttcatttttacatgccttctcgccgtagccctggctaagaatacaatggaacacgtcagcagctcagaagaaagtatcatttctcaagaaacatacaaacaggaaaaaaatatggcaataaatccctctaaagagaacctttgttctaccttctgcaaggaggttgtccgtaatgccaatgaagaggaatactctataggttcctctagcgaggagtcagccgaggtagctaccgaggaggtgaaaattaccgtcgacgacaaacactaccaaaaggcattgaacgagatcaatcagttctaccagaagtttccccaatatcttcaatatttgtatcaaggacccattgtcctgaatccttgggatcaggtgaaacgtaacgccgttcctatcacccccacccttaaccgcgagcagttgtccaccagcgaagaaaatagcaaaaagacagtagacatggagtccactgaggtctttactaagaaaaccaaactcacagaagaagagaagaatcgcctgaacttcttgaaaaaaattagtcagaggtatcagaagttcgcattgccacaatatttgaagaccgtgtatcagcatcagaaagccatgaaaccatggattcagcccaagactaaagttatcccctatgtcagatatttg

SEQ ID NO: 361 - DNA, 666 bp, synthetic construct
  source 1..666: mol_type = other DNA
atgaagttctttattttcacctgcctgttggctgttgcactcgcaaagaacacaatggaacacgtcagcagttccgaggagagtataatcagccaagaaacatataaacaggaaaagaatatggccatcaaccctagcaaagagaatttgtgtagcacattttgcaaggaagttgtcaggaatgctaatgaggaagagtatagcattgggtccagttcagaggagtcagctgaggtcgcaactgaagaagtgaagataacagtcgacgacaagcactatcagaaggccctcaacgagattaaccagttttatcagaaattcccccagtacttgcaatacctttatcaaggcccaatcgtgttgaatccttgggaccaggttaagaggaacgcagtgccaatcacacccacattgaaccgtgaacagctgtctacaagtgaagaaaactctaagaagacagttgacatggagtctacagaagtgtttactaaaaagaccaagcttacagaagaagaaaaaaacaggttgaatttcctgaaaaagatatcccaacgctatcagaagttcgctcttccacagtatttgaaaacagtatatcagcaccaaaaggcaatgaaaccttggatacaacctaaaactaaggtaatcccctacgttcgttatctc

SEQ ID NO: 362 - DNA, 666 bp, synthetic construct
  source 1..666: mol_type = other DNA
atgaaatttttcatttttacttgcttgctggccgtggcacttgctaagaatactatggaacacgttagttcatccgaggaatcaatcatttcccaagaaacatacaaacaggaaaagaatatggcaattaaccctagcaaggaaaacttgtgcagtactttttgtaaggaggtagttaggaacgccaatgaagaagagtactcaatcggttcttctagcgaggaatctgctgaggttgcaacagaagaggttaagatcaccgttgacgataaacattaccagaaggccttgaacgaaatcaatcagttttatcaaaaattcccacagtatttgcagtacctctaccagggtcctatagtactcaacccttgggaccaagtgaaacgtaatgccgttcccataacacccactttgaaccgcgagcagttgagtacctccgaagaaaatagcaaaaagaccgtggacatggagagcactgaagtgttcaccaaaaaaactaagctgactgaagaagaaaagaatagacttaatttcttgaagaaaattagtcagcgttatcaaaagttcgcccttcctcagtatctcaaaaccgtctaccagcatcaaaaagctatgaaaccctggattcagcctaaaacaaaagtcattccttatgtaaggtacctc

SEQ ID NO: 363 - DNA, 666 bp, synthetic construct
  source 1..666: mol_type = other DNA
atgaagttcttcatcttcacttgcttgctggcagtggcacttgcaaaaaataccatggagcatgtaagttcctccgaagaaagtattattagtcaagagacatacaaacaggaaaaaaacatggcaataaatccctctaaggagaacctgtgcagcaccttttgtaaagaggttgtgaggaacgcaaatgaagaagaatactctatcgggtctagttctgaagaaagcgccgaggtagcaacagaagaagtgaaaataaccgtggatgacaagcactaccaaaaagcccttaacgagatcaatcaattttaccagaaattccctcagtatctgcagtatctttaccagggccctatcgttttgaacccatgggatcaagtaaaacgtaacgccgtgcccattactcctacacttaaccgcgaacaactctcaacctccgaagagaatagcaagaaaactgtcgatatggagagtacagaagtattcacaaagaagacaaagcttaccgaggaagaaaaaaaccgccttaactttctgaagaaaatatcacagagataccaaaaattcgcactcccccagtatcttaaaaccgtctaccaacatcaaaaagccatgaaaccatggatacaacccaagaccaaggtcattccatacgttcgttacctt

SEQ ID NO: 364 - DNA, 666 bp, synthetic construct
  source 1..666: mol_type = other DNA
atgaagttttttatctttacttgcctgctcgccgtcgccctcgcaaaaaataccatggagcacgttagctctagcgaagaaagcattatatcccaggaaacttacaagcaggagaaaaatatggcaataaacccctcaaaggaaaatctctgttcaacattctgtaaggaagtagtcagaaatgcaaacgaagaagaatatagcataggtagcagcagcgaagagtcagcagaggtggcaactgaggaggtcaagattactgtggacgataaacactaccagaaagcccttaacgagataaaccaattttaccagaaatttcctcaatacctgcagtacctgtatcaaggccccatagtccttaacccctgggaccaagtaaagaggaacgctgtacccatcacccccacacttaaccgcgagcagttgtctacatctgaagaaaactccaagaagaccgtggacatggaaagcaccgaggtctttaccaagaaaaccaaacttactgaagaagaaaagaatcgccttaacttcctgaaaaaaatatcccagcgttatcaaaaattcgccttgccacaatatcttaaaactgtatatcagcatcaaaaagcaatgaaaccttggatccagccaaaaactaaggtaataccctacgtccgctacctt

SEQ ID NO: 365 - DNA, 666 bp, synthetic construct
  source 1..666: mol_type = other DNA
atgaaattttttatattcacttgcctgctggcagttgcccttgcaaagaataccatggagcacgtctcctcttcagaagagtccatcatttcacaagaaacttacaagcaggagaagaacatggctataaacccctcaaaggagaatctttgctcaacattttgcaaggaagtggtaaggaatgcaaatgaggaggaatactccattggcagctcaagtgaggagagcgcagaagttgctactgaagaagtgaagataaccgtagacgacaaacattatcagaaagcactcaacgagatcaatcagttttaccaaaagttcccacagtacttgcaatatctctatcagggtcctatcgtccttaatccctgggaccaggttaaaagaaatgctgtccctatcaccccaaccctgaatagagaacaactttctacaagcgaggaaaatagcaagaaaacagtggatatggagagcactgaagtgttcacaaaaaagaccaaactcactgaggaggaaaaaaataggctgaacttccttaaaaaaatctcccaacgctaccaaaaatttgcattgcctcagtacctcaagaccgtctaccagcatcaaaaggcaatgaaaccctggattcagccaaagaccaaggtgataccttatgtccgctacctt

SEQ ID NO: 366 - DNA, 666 bp, synthetic construct
  source 1..666: mol_type = other DNA
atgaagttttttatctttacatgtctcttggccgtggccttggctaagaatacaatggagcacgtctcttcctccgaagagtccattatatcacaggagacatacaagcaagaaaaaaacatggcaataaatccaagtaaagagaatctgtgctccaccttctgtaaggaggtcgtccgtaacgctaatgaggaggaatattctatcggatctagctctgaggagtcagccgaagttgccactgaagaagttaaaataaccgttgatgataagcactaccagaaggcattgaacgaaatcaatcagttttatcagaaatttcctcagtatctccagtatctgtatcaaggacccatagttcttaatccttgggaccaagtgaagcgtaatgccgtacccataacaccaaccctcaacagagaacagcttagcacctcagaagagaactccaagaagaccgttgatatggagagcaccgaagtgtttactaaaaagacaaagctgacagaagaggaaaagaaccgtttgaattttctcaagaagatcagtcaacgctaccaaaaatttgcactccctcagtatctcaagacagtgtaccaacatcaaaaggcaatgaagccctggattcagcccaaaactaaggtaataccatatgtacgttacttg

SEQ ID NO: 367 - DNA, 666 bp, synthetic construct
  source 1..666: mol_type = other DNA
atgaaattctttatttttacttgcttgcttgcagtggcccttgccaaaaacacaatggagcatgtatctagttccgaggagtccataatttctcaagaaacctataagcaagagaaaaacatggcaattaaccccagtaaggagaacttgtgcagtacattctgtaaggaagtagtcaggaatgccaacgaagaggaatactctataggtagtagcagtgaggaaagcgccgaagtagccaccgaggaggtcaagatcactgtcgacgataagcattatcaaaaggcactcaacgagataaaccagttttatcagaaatttccacaatatctccaatatctgtaccagggacctatagtgcttaatccatgggatcaagtcaagaggaacgcagtaccaattacccccacccttaaccgtgaacagctttccacaagcgaagagaacagtaagaagactgtggacatggaaagtactgaagttttcactaaaaaaaccaaactgaccgaggaggaaaagaatagattgaattttctgaaaaagattagtcagaggtatcagaaatttgcattgcctcaatacctcaaaacagtgtaccagcaccaaaaagccatgaagccctggatccaaccaaagaccaaggttattccctatgtgcgttatctg

SEQ ID NO: 368 - DNA, 666 bp, synthetic construct
  source 1..666: mol_type = other DNA
atgaagttctttatctttacctgtcttttggctgttgctttggctaaaaacaccatggagcacgtctcatcatccgaggagtccattatatctcaagaaacttataagcaggaaaagaatatggcaataaacccttcaaaggagaatctctgtagtacattctgtaaggaagtggtcagaaatgcaaatgaagaagagtattcaattggcagcagtagcgaagaaagcgcagaggttgctactgaggaagtcaaaatcaccgttgacgataagcattatcagaaagccttgaacgaaatcaatcaattctatcagaaattccctcagtatctccaatatctctatcaaggaccaatcgtcctgaatccatgggaccaggtgaaacgtaacgcagtacctatcacccccactcttaatagagagcagttgtcaaccagtgaagagaactccaaaaaaacagtagacatggagtctaccgaggtgttcacaaagaaaaccaagctcacagaagaagagaaaaatcgccttaactttctgaaaaaaatcagccaacgctaccaaaagttcgccttgccccaatatctgaaaactgtgtaccaacaccaaaaggccatgaaaccatggatacagccaaagactaaagtgataccttacgttagatatctc

SEQ ID NO: 369 - DNA, 666 bp, synthetic construct
  source 1..666: mol_type = other DNA
atgaagttctttatttttacctgccttctggctgtggcacttgcaaagaataccatggaacatgttagctctagtgaagaatctattatcagccaggaaacatacaagcaggagaagaacatggctatcaatccttccaaagaaaatctctgctctaccttctgcaaagaagtggtgcgcaatgccaatgaggaagagtatagcattggctcatccagtgaggaatctgccgaggtagctacagaggaagtcaaaataaccgttgacgacaaacattatcaaaaggcactcaacgaaatcaaccagttctaccaaaagttcccccagtaccttcagtatctttatcaagggcccatagttctcaatccatgggaccaggtaaagcgtaacgcagtacctattactcccactttgaatagggaacagcttagtaccagcgaggaaaatagtaaaaaaaccgttgacatggagagtaccgaagtgtttacaaagaagactaaacttaccgaggaagaaaagaaccgcctgaatttcttgaaaaaaatctcacagagatatcaaaaatttgcccttccacagtacctgaagacagtctatcagcatcagaaggcaatgaagccatggattcaacctaaaactaaagtgataccctacgttcgctatctg

SEQ ID NO: 370 - DNA, 666 bp, synthetic construct
  source 1..666: mol_type = other DNA
atgaaatttttcatttttacatgcctcctcgcagtggctctcgccaaaaacaccatggaacatgtttcaagcagcgaggaatccattataagtcaagagacatacaagcaggagaagaacatggccataaatccaagtaaagaaaacctctgctcaaccttctgtaaagaagtggtccgtaacgctaatgaggaggaatacagtataggtagtagcagtgaagagtcagctgaggtggctaccgaggaggtcaaaatcacagtcgatgataaacactaccagaaagcattgaatgaaattaaccaattttatcagaagttcccacaatacttgcaatacttgtaccagggtcccatagtccttaacccatgggatcaagttaaaaggaatgccgttccaattactccaacattgaaccgcgagcagctctcaacctccgaggaaaacagcaagaaaactgtagatatggagagtaccgaggtattcactaaaaagactaaactgactgaagaagagaagaatcgccttaattttctcaaaaagatcagccaaaggtatcaaaaatttgctctcccccagtacctgaaaaccgtatatcagcaccagaaggccatgaagccatggatacagccaaaaaccaaagtgatcccctacgtgcgctatctt

SEQ ID NO: 371 - DNA, 666 bp, synthetic construct
  source 1..666: mol_type = other DNA
atgaagttctttatcttcacttgccttcttgctgttgccctcgcaaagaacaccatggagcacgtaagtagttccgaggaatccataatttcacaagaaacatataaacaggagaagaatatggctatcaacccaagcaaggagaacctgtgcagcacattttgcaaggaggtggtaaggaacgccaacgaagaggaatattccatcgggtcctcttccgaggaaagtgctgaggttgccacagaggaggtaaaaatcacagttgacgataaacactaccagaaagccttgaatgaaattaaccagttttaccaaaagtttccccaatatctgcaatatctttaccaaggacccatcgtgctcaacccctgggaccaagtgaaaagaaatgctgtcccaataaccccaacactgaacagagagcagctttcaactagcgaagagaactccaaaaagaccgtagacatggagtctactgaagtattcacaaaaaaaactaaattgactgaagaggaaaagaataggctgaacttcctgaaaaaaataagtcagcgttaccagaaatttgctctcccacagtatcttaagactgtgtatcaacatcagaaggcaatgaaaccttggatccagcccaagactaaggtcattccttacgtgagatacctg

SEQ ID NO: 372 - DNA, 666 bp, synthetic construct
  source 1..666: mol_type = other DNA
atgaagttcttcatcttcacatgcttgttggcagtcgctcttgctaaaaacacaatggaacacgtctctagctccgaagaaagcatcatctcacaagagacatacaagcaagaaaagaacatggcaatcaacccttcaaaagaaaacctttgttctaccttctgcaaagaggttgttaggaacgcaaatgaggaagaatactccatcggatccagttccgaggaatcagccgaggtcgctaccgaggaagtgaagattactgtggacgacaagcattaccagaaggccctcaacgagataaaccaattctaccagaaattccctcaatacctgcaatatctttaccagggaccaatcgtacttaacccctgggaccaagtaaaacgtaatgccgtacctataacaccaacactcaacagggagcagctgtcaaccagcgaggagaattccaaaaagacagtagacatggaaagtaccgaggtattcaccaaaaaaaccaagctcacagaagaagagaaaaatagattgaactttcttaaaaagataagtcaacgctaccagaagtttgcccttccccagtatttgaagactgtatatcagcaccaaaaggctatgaaaccatggatacaacctaaaacaaaagtgattccttacgttaggtatctt

SEQ ID NO: 373 - DNA, 666 bp, synthetic construct
  source 1..666: mol_type = other DNA
atgaaatttttcatttttacatgtctgctcgcagtagcactggctaagaacactatggagcacgtaagttccagtgaagagtccatcataagccaggaaacatataaacaggaaaagaacatggcaatcaatccctcaaaagagaacctgtgtagtacattctgtaaagaggtagttagaaatgccaatgaagaggagtactctataggctcctcatctgaggagtctgctgaggtcgctacagaagaggtcaagattactgtggatgataaacattatcaaaaggccctcaacgaaattaaccagttctatcaaaagttcccccaatatttgcaatatctgtatcaaggaccaatagtgctcaatccctgggatcaagttaaaaggaacgcagtcccaatcacacctactctcaatagggagcaactttctactagtgaggaaaactctaaaaagaccgtagacatggagtccactgaggtattcacaaagaaaaccaaactgactgaagaggagaagaatcgcttgaatttcttgaagaaaatctcacaaaggtatcagaaattcgctttgccacaatatttgaagaccgtttatcaacaccagaaggctatgaagccttggattcaacctaaaactaaagtgattccttatgtacgttacctt

SEQ ID NO: 374 - DNA, 666 bp, synthetic construct
  source 1..666: mol_type = other DNA
atgaaatttttcatattcacttgtctgttggccgtagcattggcaaagaacacaatggagcatgttagtagtagcgaagaatccataatatctcaggagacctacaagcaggaaaagaatatggctatcaacccatctaaggaaaatctctgtagtaccttctgtaaagaggtcgtaaggaacgccaatgaagaagaatatagcatcggttcctcctcagaagagtcagccgaagtggccactgaggaagtgaagatcaccgtagacgacaagcattatcagaaggcactgaatgagatcaatcaattttaccaaaaatttccccaataccttcagtatctttatcaaggtcccatcgtacttaatccttgggatcaagttaagagaaatgctgtcccaataacccccacactgaatcgtgagcaactcagcacctcagaggaaaatagcaagaaaacagtagatatggaatccacagaggtctttaccaagaagacaaagttgacagaggaggaaaaaaaccgccttaactttctcaaaaagatttctcaaagatatcagaaattcgccttgccccaatatcttaaaacagtgtatcaacatcagaaagccatgaaaccttggatacaacctaagaccaaagtcatcccctacgtaagatacctc

SEQ ID NO: 375 - DNA, 666 bp, synthetic construct
  source 1..666: mol_type = other DNA
atgaagttcttcatttttacttgcttgctggcagtcgctttggcaaaaaatacaatggaacacgttagctccagcgaagagagcattatctcacaggagacttacaaacaggagaagaacatggctattaatccctccaaggagaatttgtgttctaccttctgcaaagaagttgtcagaaacgctaacgaggaggagtacagcatcggctcaagttcagaggagtccgccgaggtagcaaccgaggaggtaaagattactgttgatgacaaacactaccaaaaggctctcaatgagataaaccaattttaccaaaaattcccccagtatctgcaatatttgtatcagggccccatagtgctgaacccatgggatcaggtcaagcgtaacgccgtccctataaccccaacactgaacagagaacaactttctacttcagaagagaactcaaagaaaacagtggacatggagagtaccgaagttttcactaaaaaaactaagctcacagaggaagagaagaacagactcaacttcttgaaaaaaatttctcaaaggtatcaaaaattcgccctgccccaatatcttaaaaccgtttatcagcatcagaaggcaatgaaaccatggattcaacctaagactaaggtaattccatatgtgaggtacttg

SEQ ID NO: 376 - DNA, 666 bp, synthetic construct
  source 1..666: mol_type = other DNA
atgaagttctttattttcacatgcctcctggcagtagctctggcaaaaaacactatggagcatgtaagttcaagtgaagagtctatcatcagccaggaaacatataaacaggaaaagaatatggctatcaacccatcaaaagaaaatctttgctctactttttgcaaggaagtggtcagaaatgcaaatgaagaggagtactccatcggtagcagtagtgaggagagcgcagaagtagctactgaagaggtgaaaataacagtagacgataaacattaccaaaaggccctgaatgagatcaaccaattctaccaaaaatttcctcaatacctccaatacctttaccagggtcccatcgttttgaatccctgggaccaagttaagcgtaatgctgttccaattacccccacacttaatcgcgagcaattgtctacctccgaggaaaactccaagaaaaccgtagatatggagagcactgaggtcttcacaaagaaaacaaaattgacagaggaagaaaaaaataggctgaacttccttaagaaaatcagccaacgctatcaaaaattcgctcttccacaatatcttaaaaccgtgtatcaacaccagaaagcaatgaaaccttggattcagcctaaaacaaaagtgattccttacgttcgttatctt

SEQ ID NO: 377 - DNA, 666 bp, synthetic construct
  source 1..666: mol_type = other DNA
atgaagttctttatatttacatgcctccttgccgtagctctcgccaaaaatacaatggaacacgtgagtagctccgaagagtccattatatctcaagagacatataagcaagaaaagaacatggctatcaacccctccaaggagaatctctgcagtactttttgtaaggaggtagtaaggaatgctaacgaggaagagtatagtattggttcaagctctgaggagagtgcagaagtggccacagaagaagtcaaaatcactgtagacgataaacattatcaaaaagctctcaacgaaattaatcaattttatcaaaagttcccacaatacctccagtacctgtaccaaggacccattgtcttgaatccctgggaccaggtaaaacgcaacgccgtacccattacacccacactgaatcgtgagcagctctctacatcagaggaaaatagtaaaaaaaccgtcgacatggagtcaacagaagtgttcacaaagaaaaccaaattgacagaagaggaaaaaaatcgcctcaacttcctcaagaagatcagtcaacgctatcaaaaattcgctttgcctcagtacttgaaaactgtttatcagcatcaaaaagctatgaaaccttggatacagcccaagaccaaggttataccttatgtccgctacctg

SEQ ID NO: 378 - DNA, 666 bp, synthetic construct
  source 1..666: mol_type = other DNA
atgaaattcttcatattcacctgcctgctcgccgtcgcattggcaaaaaacactatggagcatgtaagttcctcagaagagagtataatctctcaggagacctacaagcaagaaaagaacatggccattaatccaagcaaggaaaatctgtgtagtaccttttgtaaggaggtggtgaggaatgctaacgaagaggaatactcaatcggttccagttcagaagaatcagccgaagtagcaactgaagaagtaaagattaccgttgacgacaagcactatcagaaagcccttaacgagatcaaccaattctatcaaaaattcccacaataccttcagtacctgtatcagggccccattgtgcttaacccctgggatcaggtcaaaaggaatgctgtaccaatcacacccacattgaatagggagcaactgagtacatccgaagaaaatagcaagaagaccgtggatatggaatctaccgaggttttcactaaaaaaactaagttgacagaagaagaaaagaaccgtctgaacttccttaaaaaaatctcacaaaggtaccaaaagtttgctctccctcaataccttaaaaccgtttatcaacatcagaaagccatgaaaccctggatacaaccaaagactaaggttataccatacgtgcgttatctt

SEQ ID NO: 379 - DNA, 666 bp, synthetic construct
  source 1..666: mol_type = other DNA
atgaaattttttatctttacatgccttcttgccgtcgctcttgccaagaatactatggagcatgtttctagtagcgaagaatccatcatttctcaggaaacatataagcaagagaaaaatatggctatcaacccatctaaagaaaatctttgctccaccttctgcaaagaggtggtcagaaatgctaatgaggaggagtatagtattggtagtagttcagaagaaagcgccgaagttgcaacagaggaagtgaaaatcaccgtcgatgataaacactatcagaaggcactgaacgagatcaaccaattttaccaaaagtttccacagtaccttcaatatctttaccaagggcccattgtgctgaacccttgggatcaggtcaaaaggaacgctgttcccatcacccctactttgaatcgtgaacaactttccactagtgaggaaaacagtaaaaaaacagttgacatggagagtacagaagtgtttactaaaaaaaccaagctcactgaggaagagaaaaacaggttgaacttcttgaaaaagatctctcagagatatcagaaatttgccttgccacagtaccttaaaactgtgtaccaacatcaaaaagctatgaaaccttggatacaaccaaaaactaaagtgataccttacgtccgttatctg

SEQ ID NO: 380 - DNA, 666 bp, synthetic construct
  source 1..666: mol_type = other DNA
atgaaatttttcatttttacctgtctcttggcagtcgctctggcaaaaaatactatggaacatgtaagcagttctgaagagtcaatcatttcccaagagacctacaagcaggagaagaatatggccatcaacccaagcaaggaaaacctctgtagtaccttttgcaaggaagtcgtcagaaacgcaaacgaagaggaatactcaattggaagcagtagcgaggagtcagcagaagttgctaccgaggaagtcaaaataacagtcgatgacaagcattatcagaaggctcttaatgagatcaatcaattttaccagaaattccctcaatatctccagtatctctatcaaggacctatagttctgaatccttgggaccaggtcaagaggaacgctgtgcctataaccccaacactcaaccgcgaacaattgagtacttccgaggaaaattcaaaaaaaactgtagacatggaaagtactgaggttttcacaaagaagacaaaactcaccgaggaggagaagaatcgcctcaactttttgaagaagatttcccaaagatatcaaaagtttgcactcccccaatatctcaaaaccgtatatcagcaccagaaagcaatgaagccctggatacaaccaaaaacaaaggtgataccttatgtgagatatttg

SEQ ID NO: 381 - DNA, 666 bp, synthetic construct
  source 1..666: mol_type = other DNA
atgaagttcttcatctttacctgtctcttggcagttgcattggccaaaaatactatggagcacgttagtagctcagaagaatcaattattagccaggagacttataaacaggagaaaaacatggccattaacccaagtaaggaaaatttgtgttcaactttctgcaaagaggtcgttaggaatgcaaatgaagaggagtattccatcgggtcttcctccgaagaaagcgccgaggtggccactgaagaggtaaaaatcacagttgatgataagcattaccaaaaggccctcaacgaaataaatcagttctaccaaaaattccctcagtacctccagtatttgtatcaagggccaatagttcttaatccttgggatcaagtaaagcgcaatgctgttccaatcacaccaactttgaatcgtgagcaactctccacctccgaggaaaattcaaagaagaccgttgacatggaaagcactgaagttttcacaaagaaaacaaagctcaccgaggaggaaaagaataggctcaacttccttaaaaagatcagccaaagataccaaaagttcgctcttccacaatatttgaagaccgtgtaccaacatcaaaaggcaatgaaaccttggatacaaccaaaaaccaaggttataccatacgtgcgttacctt

SEQ ID NO: 382 - DNA, 666 bp, synthetic construct
  source 1..666: mol_type = other DNA
atgaagttcttcattttcacttgtctcttggctgttgcacttgctaagaataccatggagcatgtgtctagttcagaagaatctattattagccaggagacatacaaacaagagaagaacatggctatcaacccatctaaggaaaacctctgttctaccttttgcaaggaagtagttagaaacgctaatgaggaagaatatagtattggctcttcatcagaggagtctgccgaagttgctacagaggaagtgaaaataaccgtagacgacaagcattaccaaaaggcactgaacgaaattaatcagttttatcagaagttccctcaatacttgcaatacctgtatcagggacctattgtcttgaatccctgggaccaggtcaaacgtaatgctgtgcccataactcccacccttaacagggaacagttgtcaacttctgaggagaactctaaaaaaacagtcgacatggagtcaacagaggtcttcaccaagaagactaagctcacagaggaagagaagaacaggctgaacttcctcaagaagatatctcaacgctatcagaagtttgcacttccacagtacctgaagaccgtgtaccagcatcagaaggcaatgaaaccatggattcagcccaagacaaaggtcataccctatgttagatatctg

SEQ ID NO: 383 - DNA, 666 bp, synthetic construct
  source 1..666: mol_type = other DNA
atgaagttctttatattcacatgccttttggctgtggcccttgccaaaaacactatggaacacgtctcttcaagtgaggagagtataatatcacaagaaacttacaagcaagagaagaatatggccattaatccaagcaaagagaatctttgttccactttttgtaaagaggtcgtgaggaacgccaacgaagaggagtatagtatcggttcatctagcgaggaatctgccgaggtagccaccgaagaggtaaaaataactgttgacgacaagcactatcagaaggcactgaacgaaataaaccaattttaccagaagttcccacagtatcttcaatacctctaccagggacctattgttttgaatccttgggaccaggtcaaacgtaacgctgtccctattactccaactcttaatcgcgaacagctttcaacctcagaggagaattcaaagaaaaccgtggatatggagtcaaccgaggtgttcaccaagaagacaaaactcacagaagaggaaaaaaatcgcctcaatttccttaaaaagataagtcaaaggtatcagaagttcgccctcccccaatatttgaagaccgtatatcaacatcagaaggctatgaagccctggattcagcctaagactaaggtaataccttacgtccgctacctg

SEQ ID NO: 384 - DNA, 666 bp, synthetic construct
  source 1..666: mol_type = other DNA
atgaagttcttcattttcacatgccttcttgcagtggcccttgcaaagaacacaatggaacatgtctcatcatcagaagaatctattattagtcaggagacctataagcaagaaaagaacatggctatcaatccatccaaggaaaacctttgtagtactttttgcaaggaggtcgtgagaaacgcaaacgaagaagaatactctattggttcatcatccgaagagtcagctgaggtagccaccgaagaagtaaaaattaccgtggacgacaagcactaccaaaaggctcttaatgaaataaaccaattttatcagaagtttccccagtacttgcagtacctctatcaaggacctatcgtgctcaatccttgggatcaggtcaagaggaacgctgtccccataaccccaactctgaacagggagcaactctctacatcagaggaaaacagtaagaagaccgtcgatatggaaagtactgaagtctttacaaagaaaacaaagctgacagaggaagaaaagaatcgcttgaactttctgaaaaaaatctcccagaggtatcagaagttcgctcttccacagtacctgaaaaccgtgtaccagcatcaaaaagctatgaaaccatggatacagcctaagacaaaggttattccatacgtccgttacctc

SEQ ID NO: 385 - DNA, 666 bp, synthetic construct
  source 1..666: mol_type = other DNA
atgaagttctttatctttacctgcttgctggcagttgcactcgctaagaacaccatggagcatgtgtcatcatctgaggaaagtataatctcccaggaaacatataaacaagagaaaaatatggccattaaccccagcaaggaaaacctctgctcaactttctgcaaagaagtggttcgcaatgctaacgaggaagagtattctattggaagctcatcagaagaaagtgccgaagtcgctacagaggaagttaaaattacagttgacgataaacactaccagaaggcactgaatgagataaaccagttttaccagaagttcccccagtatctgcagtacctgtaccagggacccattgtacttaacccatgggatcaagtcaaaagaaacgccgtccccataactccaacactcaacagggaacagctctccacttctgaagagaattccaaaaagacagtcgacatggaatctacagaagtctttaccaagaagacaaagctgaccgaagaagagaagaaccgtttgaattttctgaagaaaatttcccagagataccaaaaattcgctcttccacaatatctcaagactgtctatcagcatcaaaaagctatgaagccttggattcaaccaaagactaaggtcatcccctatgtacgttatctt

SEQ ID NO: 386 - DNA, 666 bp, synthetic construct
  source 1..666: mol_type = other DNA
atgaagtttttcatttttacatgtctgctggcagtagctcttgctaaaaacactatggagcacgtttcaagttcagaggaatccatcatcagtcaggagacttacaaacaggagaaaaatatggctatcaatccttcaaaagagaatctctgtagtaccttttgtaaagaggtggtgagaaatgctaacgaagaagaatatagcattggatctagctctgaggagtccgccgaggtcgctactgaagaagtaaagattactgtggatgataagcactatcagaaggccctgaacgaaatcaaccagttctatcagaagttcccccagtatcttcagtacttgtaccaggggccaattgttttgaatccctgggaccaagtaaagcgtaacgccgtacccattactccaacactgaatagagaacaactgtccacttccgaggagaactccaagaagaccgtagatatggagagtacagaagtgtttactaaaaaaactaaactcacagaagaagagaagaatcgtctgaattttctgaagaaaattagtcaacgctaccagaaattcgctctgccccaatatctcaagacagtttaccagcaccaaaaggcaatgaagccctggattcaaccaaagaccaaggtgattccatacgttcgctatctt

SEQ ID NO: 387 - DNA, 666 bp, synthetic construct
  source 1..666: mol_type = other DNA
atgaagttttttatatttacttgtctgctggcagtagccctggccaaaaatacaatggagcacgtgtcaagctccgaggaatcaatcattagccaagaaacttacaagcaagagaaaaatatggctataaatccaagcaaggagaacctttgtagtactttttgtaaggaggtggtccgcaacgccaacgaggaggagtatagtattggtagttccagtgaagaaagtgcagaagtcgccaccgaggaggttaagattaccgttgacgacaaacactatcagaaagccctcaatgaaataaatcaattctatcagaaatttcctcaatacctccagtacctgtatcaaggaccaatagtcctcaatccctgggaccaggttaaaagaaatgctgtccccataactcctacccttaacagggaacagctttctactagcgaagaaaacagcaaaaagactgtcgatatggaatcaaccgaggtgtttaccaagaaaactaagctgacagaggaagaaaaaaataggctgaatttcctcaaaaaaatatctcaaaggtaccaaaagttcgccctgccacaatatctgaaaaccgtatatcagcaccaaaaagccatgaaaccatggattcaacctaaaaccaaagtcatcccttacgtccgctacctt

SEQ ID NO: 388 - DNA, 666 bp, synthetic construct
  source 1..666: mol_type = other DNA
atgaaatttttcatattcacatgcctcctcgcagtagcccttgcaaagaacacaatggaacacgtctctagcagcgaagaatcaataatatctcaggaaacctacaaacaagagaagaatatggccattaaccctagtaaggagaacctttgctccacattttgcaaagaggttgttcgtaacgctaatgaggaggaatacagcattggttcttcttcagaagaaagtgcagaagtcgctacagaagaagtcaaaatcactgtagatgataagcattaccagaaggctctcaatgaaattaaccagttctatcaaaaatttccacaatatcttcaatacctgtatcaaggcccaattgtacttaacccctgggatcaggtgaaacgcaatgctgttcccatcactcctacacttaaccgcgaacagctctcaacaagtgaggagaactctaagaagactgtggatatggagagcactgaagtgtttacaaagaaaaccaaacttaccgaggaggagaaaaatcgtttgaattttttgaaaaagatctctcagcgttaccaaaaatttgctcttccccaatacttgaaaactgtctatcagcatcaaaaggcaatgaaaccttggatacagcccaagacaaaagtcataccatacgtgcgctacctg

SEQ ID NO: 389 - DNA, 666 bp, synthetic construct
  source 1..666: mol_type = other DNA
atgaaattttttatcttcacatgcctcctcgccgttgctttggccaaaaatactatggagcacgtaagtagtagcgaagaaagcattatcagccaggaaacttacaaacaggagaagaacatggcaattaatccaagcaaggagaatctgtgctcaaccttctgtaaggaagtcgttaggaatgcaaacgaagaggaatacagtatcggatcttcctctgaagagtctgccgaagttgctaccgaggaggtgaaaatcaccgttgacgacaagcattaccagaaagctctgaacgagatcaatcagttttatcagaagtttccacaatatttgcagtatctttaccaagggcctatagttcttaacccctgggaccaggtcaaacgtaacgctgttcccataactcctactctcaatagagaacaacttagtacaagtgaggagaactcaaagaaaactgtcgatatggagagtactgaagtattcaccaagaagactaaactcactgaggaagaaaaaaaccgtctgaactttttgaagaaaattagtcaaagataccaaaagtttgccttgccacaatatttgaaaaccgtctatcaacaccaaaaagctatgaagccctggatacaaccaaaaacaaaggtgataccctatgttcgttatctc

SEQ ID NO: 390 - DNA, 666 bp, synthetic construct
  source 1..666: mol_type = other DNA
atgaaattcttcattttcacttgtttgcttgccgtggccttggctaaaaatacaatggaacacgtaagttcctcagaagaaagcattatatctcaagagacttataaacaagagaaaaatatggccataaaccccagtaaggaaaatctctgttcaacattctgtaaagaagttgtgcgcaacgctaatgaggaagagtacagtattggatcttcctccgaggagagtgctgaggtcgccaccgaggaggtgaagatcaccgtagacgacaaacattatcaaaaagcattgaatgaaattaaccagttttaccagaaattcccccagtacctccaatatctgtatcagggtcctattgtcctgaatccatgggatcaggtgaagcgcaatgctgtaccaatcacccctacactgaacagggagcagctgtcaacttcagaagaaaacagcaagaagaccgtagatatggaaagtacagaggtctttaccaaaaagacaaaactgaccgaagaggagaagaaccgtctgaattttttgaagaaaatatcccagaggtaccagaaatttgctctgccccagtatctcaagactgtttaccaacaccaaaaagccatgaagccttggattcaaccaaaaactaaggttatcccctacgtgcgttacctt

SEQ ID NO: 391 - DNA, 666 bp, synthetic construct
  source 1..666: mol_type = other DNA
atgaaattttttatattcacctgtctcctcgccgtagcactggcaaagaatactatggagcacgtttcaagctccgaggagtcaatcattagtcaggaaacttataagcaagaaaaaaatatggcaattaacccctctaaggagaatctgtgttctaccttttgtaaagaagtggtgaggaacgcaaacgaagaggaatactcaataggatcatcttccgaggagtctgccgaagttgcaacagaagaagtcaaaatcactgttgatgataaacactaccaaaaggcactcaacgaaataaatcagttctaccagaagttcccccaataccttcaatatctgtaccaggggcctatcgttcttaacccttgggatcaagtcaagaggaatgcagttcctattactccaacattgaatcgcgaacaactctcaactagtgaagagaatagtaaaaagactgtagacatggagtctacagaagtgttcacaaagaagaccaaattgaccgaagaagagaagaacagactgaacttcttgaaaaagattagtcagcgttatcagaagtttgctctcccacagtatctcaaaacagtgtaccaacaccaaaaagccatgaagccttggatacagcccaagaccaaggtaatcccctacgtcaggtacctc

SEQ ID NO: 392 - DNA, 666 bp, synthetic construct
  source 1..666: mol_type = other DNA
atgaaattcttcatctttacttgccttctcgccgttgctcttgccaaaaacacaatggaacatgtcagtagttctgaggaaagcatcatctcacaagaaacttacaaacaggaaaagaatatggctataaatccatcaaaagaaaatttgtgctccacattttgcaaggaggttgtccgcaacgctaatgaggaagaatacagcattgggtctagttctgaagaatctgccgaagttgccactgaagaggttaaaataaccgtggacgacaaacactatcaaaaggccctgaatgaaattaaccagttttatcaaaaatttcctcagtacctccagtacctgtaccagggtcccatcgtgctcaatccatgggaccaagtgaaacgcaacgctgtgcctattactccaaccttgaacagagagcaactgagcacttctgaggaaaacagtaagaagaccgtcgatatggaatccacagaagtgttcacaaaaaagactaaactcaccgaagaggaaaagaaccgccttaattttttgaaaaagatttctcaacgttatcagaagttcgcccttccacagtacctcaaaactgtttaccaacatcaaaaagctatgaagccctggatacaacccaaaactaaagtcatcccctatgtgaggtatttg

SEQ ID NO: 393 - DNA, 666 bp, synthetic construct
  source 1..666: mol_type = other DNA
atgaaattcttcatcttcacttgtctccttgccgtcgcacttgctaagaatacaatggaacatgtctcctctagcgaagagagtataataagccaagagacttacaaacaagaaaaaaacatggcaattaatccaagcaaggagaatctctgtagtaccttttgcaaggaagtcgtcagaaatgctaacgaggaagagtactccatcggtagctctagcgaggagagtgcagaagtcgccaccgaggaggtaaaaattacagtcgatgataagcactatcaaaaggctctgaacgaaataaatcagttttaccagaagttcccccaatatcttcaatacctgtatcaaggccccatagtattgaatccttgggatcaggtaaagaggaatgccgtccccataacccctaccctgaatagggagcaacttagcactagcgaagagaatagcaaaaaaaccgtggacatggagagtacagaggtgtttacaaagaagacaaaacttaccgaagaggagaaaaacaggctgaattttcttaagaaaatttcacaacgctaccagaagtttgccttgcctcagtatctgaagaccgtttaccagcatcagaaagctatgaaaccttggattcagcccaagacaaaggtaattccttatgtgaggtacttg

SEQ ID NO: 394 - DNA, 666 bp, synthetic construct
  source 1..666: mol_type = other DNA
atgaaatttttcatcttcacctgtcttttggcagtagccttggcaaaaaatactatggagcatgtgagtagctcagaggaatccataatttcacaagagacatacaagcaagagaagaacatggcaatcaacccaagtaaagaaaacctgtgctctaccttttgcaaagaggtggtccgtaacgctaacgaggaagaatattcaatcgggagttcctctgaggaaagtgccgaagtggcaactgaggaagtaaaaattaccgtcgacgataagcattatcagaaggcactgaacgaaatcaaccaattctatcaaaagtttccccaatatcttcagtacctgtaccaggggccaatcgtattgaatccctgggatcaggtgaagcgtaacgccgttcccataactcccactttgaacagggagcagttgtccactagtgaagaaaattccaaaaagactgtggatatggagtctacagaggtattcactaaaaagaccaaacttaccgaggaggaaaaaaacagattgaactttttgaaaaagatttcacaacgctatcagaagtttgcccttcctcagtacctcaagaccgtatatcaacaccagaaggctatgaagccatggatccagcctaagacaaaagtgatcccatatgtccgctacctc

SEQ ID NO: 395 - DNA, 666 bp, synthetic construct
  source 1..666: mol_type = other DNA
atgaaattcttcatatttacctgcctgctggccgtcgccttggcaaagaatacaatggagcacgtcagcagcagtgaggaaagcattatatctcaagaaacctataaacaagagaaaaacatggccataaacccaagcaaagaaaacctttgttccacattctgtaaggaagtagtaagaaatgctaacgaggaggagtatagcattggtagctctagtgaagaaagcgccgaagtggccaccgaagaagttaaaataaccgtagacgacaaacactatcagaaagcattgaatgagataaaccaattctatcaaaagttccctcaatatctgcagtatctttatcagggaccaattgttcttaatccttgggatcaagtaaaaaggaacgcagtccctataactcccactctcaaccgtgagcaattgtcaacttctgaagaaaacagcaagaaaaccgtagacatggagagcaccgaagttttcaccaaaaaaactaaactcaccgaagaggagaaaaatagactcaacttccttaagaaaatatctcaaagataccagaagtttgcacttccacagtatctcaaaacagtctaccagcatcagaaggcaatgaaaccttggatacagcccaaaaccaaagtgattccctatgtcagatatttg

SEQ ID NO: 396 - DNA, 666 bp, synthetic construct
  source 1..666: mol_type = other DNA
atgaaattcttcatatttacctgtttgttggctgtagcactggccaagaatactatggaacacgtatcttctagcgaggaatccatcataagccaggaaacctataagcaagagaaaaacatggcaattaaccccagcaaagagaatttgtgttccacattctgcaaggaggtcgtcagaaatgcaaacgaagaggaatattccataggtagctcctctgaggagtcagccgaagtggctactgaggaagttaaaattactgtagatgataaacattatcagaaggcactcaacgaaatcaaccaattctaccagaaatttccccaatacttgcaatatctctatcagggaccaatagttctgaatccttgggaccaagtcaagagaaatgcagttccaataacacccaccctcaatcgcgagcaactgagtacaagtgaagaaaacagtaagaagaccgtagacatggagtctactgaagtttttaccaaaaaaacaaaattgactgaagaggagaagaataggctcaacttccttaaaaagatttcccagcgctatcaaaagtttgcacttccacagtatctcaaaacagtttaccaacaccagaaggccatgaaaccctggatccagccaaagaccaaggtaattccctatgtacgttatttg

SEQ ID NO: 397 - DNA, 666 bp, synthetic construct
  source 1..666: mol_type = other DNA
atgaagttttttatatttacctgccttcttgctgttgctcttgctaagaatacaatggaacacgtgagttcatctgaagagtccataattagccaggaaacttacaagcaggagaaaaacatggctatcaatcctagcaaggaaaacctttgtagcaccttttgtaaagaggttgtacgcaacgctaatgaggaagaatacagcattgggtcctcctctgaagaaagcgccgaagttgctaccgaagaggtcaaaattactgtagatgataaacactaccagaaggcccttaacgaaattaaccagttctatcagaaattcccccaatatctgcaatacctctatcaaggccctatagttcttaatccatgggatcaggtcaagcgtaatgccgttcctattacacctacattgaatagggaacaactgagcacttcagaggaaaactcaaagaaaacagttgacatggaaagcactgaggtatttactaaaaagaccaagctgactgaggaggaaaagaaccgcctgaatttcctgaaaaagatcagtcaaaggtatcagaaatttgcacttccacaatatttgaaaaccgtgtaccagcaccagaaggccatgaaaccatggattcaacccaagactaaggtgatcccctatgtgaggtatttg

SEQ ID NO: 398 - DNA, 666 bp, synthetic construct
  source 1..666: mol_type = other DNA
atgaagttctttatctttacttgcctcttggctgtggccctcgcaaagaataccatggaacacgttagttccagcgaagaatctatcatttcacaagagacctataaacaggaaaaaaatatggctatcaacccttccaaggaaaacttgtgttctaccttctgtaaggaggttgtgagaaacgccaatgaagaagagtatagcatcgggagctcttctgaagagtccgcagaggtggctacagaagaagttaagattactgttgacgataaacactaccagaaggccctgaatgagattaatcaattttaccaaaagtttccccaatacttgcagtacctttaccagggtcctattgttctcaatccttgggaccaagttaaacgtaacgcagtgcccatcactcctaccctcaaccgcgagcagctttctacaagcgaggagaacagcaagaaaaccgtagatatggaaagcaccgaggttttcaccaagaaaactaaacttaccgaggaggagaagaatagacttaattttctgaagaaaattagtcagaggtaccagaagtttgcacttccccagtatctcaagacagtctatcagcatcagaaggcaatgaagccatggatacaaccaaaaaccaaagtgattccctatgtaagatatctg

SEQ ID NO: 399 - DNA, 666 bp, synthetic construct
  source 1..666: mol_type = other DNA
atgaaattctttatcttcacttgtctgttggcagtcgctctggctaaaaacacaatggagcacgtaagttctagtgaagagtctattatctcccaggaaacatataagcaggaaaaaaatatggcaattaacccatctaaggagaacctctgcagcacattctgtaaagaggtagtgagaaatgctaacgaagaggagtatagcataggtagctcttccgaggaatcagcagaggtagcaaccgaagaagtgaagatcactgtcgatgataagcattatcagaaagcactcaacgagatcaaccaattctaccagaagtttccccagtacctgcagtacctgtatcaggggccaattgttctgaacccatgggatcaggtaaaacgtaatgccgtccctatcaccccaactctgaaccgtgaacaactgtccacatcagaagaaaatagcaaaaagaccgtagatatggagtccacagaagtgtttactaagaagactaaattgactgaggaggaaaaaaaccgcctgaacttccttaaaaagatatcccagcgttaccagaagtttgcactgccccaatatcttaaaaccgtctatcaacatcagaaggccatgaaaccttggatacagccaaaaacaaaagtaataccctacgtcaggtatctc

SEQ ID NO: 400 - DNA, 666 bp, synthetic construct
  source 1..666: mol_type = other DNA
atgaaatttttcatcttcacctgtttgctcgccgtcgctctcgcaaaaaacactatggaacatgtttcctcatctgaagaaagtataataagccaagagacatataaacaagaaaagaatatggctataaaccctagcaaagagaatctttgctccacattctgtaaggaagtagtcaggaacgctaacgaggaggaatatagcattggatcttcctctgaggagtctgcagaggttgcaaccgaagaggtcaagattacagttgatgataagcactaccagaaggctttgaatgagataaaccagttctatcagaagttcccccagtatctgcaatacttgtaccaaggtcctatcgtcctgaatccctgggaccaagtaaagagaaacgcagtgcccatcacacctacactgaacagagagcagcttagcacttctgaagaaaattctaaaaagaccgtggacatggagtccacagaagtttttaccaagaaaaccaagttgaccgaggaggagaagaatcgtcttaacttcctgaaaaagatatctcaacgctatcaaaaatttgcccttcctcaatatcttaaaaccgtttatcaacaccagaaggcaatgaagccttggatccagcccaaaacaaaagtaattccttacgtgaggtatctg

SEQ ID NO: 401 - DNA, 666 bp, synthetic construct
  source 1..666: mol_type = other DNA; note = Alpha-S2 Wild type
atgaagttcttcatctttacctgccttttggctgttgcccttgcaaagaatacgatggaacatgtctcctccagtgaggaatctatcatctcccaggaaacatataagcaggaaaagaatatggccattaatcccagcaaggagaacctttgctccacattctgcaaggaagttgtaaggaacgcaaatgaagaggaatattctatcggctcatctagtgaggaatctgctgaagttgccactgaggaagttaagattactgtggacgataagcactaccagaaagcactgaatgaaatcaatcagttttatcagaagttcccccagtatctccagtatctgtatcaaggtccaattgttttgaacccatgggatcaggttaagaggaatgctgttcccattactcccactctgaacagagagcagctctccaccagtgaggaaaattcaaagaagaccgttgacatggaatcaacagaagtattcactaagaaaactaaactgactgaagaagaaaagaatcgcctaaattttctgaaaaaaatcagccagcgttaccagaaattcgccttgccccagtatctcaagactgtttatcagcatcagaaagctatgaagccatggattcaacctaagacaaaggttattccctatgtgaggtacctt

SEQ ID NO: 402 - DNA, 672 bp, synthetic construct
  source 1..672: mol_type = other DNA
atgaaggtgttgattctcgcttgtcttgttgctcttgcactggctagggaattggaagagttgaatgtccctggtgagatcgttgaatcactttctagcagtgaagagtcaatcacaaggataaataagaagatcgagaaatttcaatccgaagagcaacagcagactgaagatgaacttcaagataaaatacatccttttgcccaaacacaaagtctggtataccctttcccaggtcctatccctaacagccttccacagaacatacctcctctgacacaaactcccgttgtggttccaccattcctccagccagaagtaatgggggtctcaaaggtaaaagaggctatggctcccaaacataaggaaatgccatttcctaagtaccctgttgagccttttaccgagtcccaatccctcacacttaccgatgtagagaatctccaccttccacttcccctccttcaaagttggatgcatcaaccacaccagccactgccccccactgtaatgtttccacctcaatctgtcctgtccctctctcagagtaaagtccttcccgtcccccagaaggctgttccttaccctcaaagagacatgcctattcaagcctttttgttgtaccaagaaccagtcctgggtcctgtgcgcggaccatttcccattattgtc

SEQ ID NO: 403 - DNA, 672 bp, synthetic construct
  source 1..672: mol_type = other DNA
atgaaagttttgatcctcgcctgccttgtggccctcgctctcgcaagagagctggaagaacttaatgtgcctggtgagatagtagagtcactctcatcatccgaagaatcaataacccgcattaacaaaaagattgaaaaattccaaagtgaggagcaacaacaaactgaagacgaactccaggacaaaatacacccctttgcacaaacacagagccttgtgtatccttttcctggacccatccccaattctttgccccagaatatccctccactcacccaaacccctgtagttgtcccacctttcctccaacctgaagtaatgggggtaagtaaggtcaaggaagctatggcccctaaacacaaggaaatgccctttcctaaataccccgtggaaccattcaccgagagccaaagcttgaccctgacagacgtggaaaacctccacctccccctgcccctcctccagagttggatgcatcaaccccatcaaccactccctcctactgtcatgtttcccccccaatctgtcctcagcctctctcaatctaaggttttgcctgtcccccaaaaagcagttccctatccccaaagggatatgcctatccaagcttttctcctgtatcaggaacctgttctcggccccgtccgcggacccttccctatcattgtt

SEQ ID NO: 404 - DNA, 672 bp, synthetic construct
  source 1..672: mol_type = other DNA
atgaaagtgctgattctcgcctgcctggtagcccttgctcttgcccgtgaactcgaagaattgaacgtacccggcgagatagttgagtcattgtcctcctcagaagagtccatcacacgtattaacaagaaaattgaaaaatttcagtccgaagaacagcagcagacagaagatgaattgcaggacaagatccacccattcgcccagacccaaagtttggtctatcccttccctggccctataccaaactctcttcctcagaacataccccccctgactcagactccagtcgtcgttcccccctttctccagcctgaagtcatgggagtaagtaaagtaaaggaagctatggcccctaagcacaaagaaatgccttttccaaagtaccccgtggaacccttcactgagagccagagtctgacactgaccgacgtagagaatctgcacctgccactcccactgcttcaaagctggatgcaccagccacatcaaccactccctcccaccgtcatgtttcctccacagagtgttctttctctttcacagagcaaagtgctccccgttccccaaaaagctgtgccctaccctcaaagggatatgcccattcaagccttcttgttgtaccaggaacctgtactcggtccagtgcgtgggcctttccctataattgta

SEQ ID NO: 405 - DNA, 672 bp, synthetic construct
  source 1..672: mol_type = other DNA
atgaaagtacttatcttggcatgtctcgttgcactcgcactggctcgtgagttggaggaactgaacgtccccggtgaaatcgttgaaagcctttcctcatctgaagagagcataacaagaataaacaagaaaatcgagaagtttcagagcgaggaacagcaacagacagaagatgagcttcaggacaaaatacacccttttgcacaaacacagagcctggtgtaccctttccctggaccaattcccaattcccttcctcagaacatccctccactgacacagactcctgtagtggtccctccctttctgcaacctgaggtgatgggggtctccaaggtaaaggaagctatggcaccaaaacataaggagatgcccttcccaaagtatccagtggaacctttcaccgagagccaatctttgaccctcactgacgtcgaaaacttgcaccttccccttcccctgcttcaatcttggatgcaccaacctcatcaacctcttccccctactgttatgtttccacctcaatccgttcttagcctcagccaaagtaaagtccttccagtgccccaaaaagcagtaccatatccccagcgcgacatgcctatacaagcatttctgctgtaccaggagcctgtactcggccccgtaaggggaccattcccaatcattgta

SEQ ID NO: 406 - DNA, 672 bp, synthetic construct
  source 1..672: mol_type = other DNA
atgaaggtattgattctggcatgcctcgtggctctggcccttgcacgcgagttggaagagcttaacgtacctggcgaaattgtagaaagcctttcaagttccgaggagtctatcaccaggattaacaagaagatagaaaagttccaaagcgaagaacagcaacaaaccgaggacgagctgcaggacaagatacatccatttgctcagacacagagcctcgtctacccatttccaggaccaattcctaactctttgccacagaacattccccctttgacccagacacctgtggtggttccacccttcttgcaacctgaagtaatgggtgtatcaaaggtgaaggaggcaatggcacctaaacacaaagaaatgccatttcctaaatatccagttgaaccattcaccgaaagccaatctcttacactcactgatgtcgaaaatctgcaccttcctctgcctttgttgcaaagttggatgcaccaacctcaccagcccttgcccccaactgtgatgttccctcctcaatctgtgctttctttgtcccaaagtaaggttcttcccgtaccacaaaaagctgttccataccctcagagggatatgccaatccaggcatttctcctctaccaagaacctgtcctcgggcctgttcgtgggccattcccaataattgta

SEQ ID NO: 407 - DNA, 672 bp, synthetic construct
  source 1..672: mol_type = other DNA
atgaaggtgctcatattggcctgtctcgtagctctcgcccttgcccgtgaactggaagaactcaacgtaccaggcgagatagtggaatctctcagttcctcagaggaatctatcacccgtataaacaaaaagatcgaaaaattccaatccgaagagcaacaacagacagaagacgaacttcaggataaaatccatccatttgcacaaacccagagccttgtatacccatttccagggccaatacccaacagtctcccacagaatatccctcccttgacacagacccctgttgtcgttcctccttttttgcagcccgaggtcatgggggtgagtaaagtaaaagaagccatggctcccaaacacaaggaaatgccctttccaaaatatcctgtcgaaccattcactgagtcccaaagtcttaccttgactgatgtggagaatctccatcttcccctgcccttgcttcagtcatggatgcaccaacctcatcagccccttccacctacagtcatgttcccaccacagagtgtactttctcttagccagtcaaaagtgctgcccgttccccaaaaggcagttccttatccccaacgtgatatgccaattcaagcctttcttttgtatcaggaacctgttctgggccccgtgcgcggtcctttcccaattattgtt

SEQ ID NO: 408 - DNA, 672 bp, synthetic construct
  source 1..672: mol_type = other DNA
atgaaggtgctgattctggcttgtcttgtcgcactcgctctcgcccgtgaactggaggaactcaacgtgccaggagaaatcgttgagtcactctcctcaagtgaagagagcatcactcgtataaacaaaaaaatagagaaatttcagtctgaagagcagcagcagaccgaggacgagctccaagacaaaatacacccctttgcacaaactcagagtctggtatatcccttccccggcccaatacctaattccctgccccagaacattccaccccttacccagactcccgtagttgtccccccatttttgcagccagaggttatgggcgtctcaaaggtgaaggaggcaatggctcccaagcataaagagatgccattccccaagtaccctgttgagcctttcactgagagtcagtctcttacactcactgatgttgagaacctgcacctgcctctgcctttgctccagtcctggatgcaccaaccccatcaaccactccccccaaccgttatgttccctccacagagtgtcttgagtctcagtcagtccaaagtattgccagtacctcagaaggcagtgccttatccacaacgcgacatgccaattcaggcatttttgctctaccaggagcctgttctcggccctgttcgtggcccttttcctattattgtg

SEQ ID NO: 409 - DNA, 672 bp, synthetic construct
  source 1..672: mol_type = other DNA
atgaaagttttgatactcgcatgtcttgtagctctcgcactcgctagagagttggaggagctcaacgtcccaggcgagatcgtagagtcactgagttcatccgaggagtccatcacacgtataaataaaaagatcgagaagtttcagtcagaagagcaacaacaaacagaagatgagcttcaagacaagatacatccatttgcccagacacagtctctggtgtaccctttccctggacccattcctaattcacttccccaaaatattcctccacttacccagactcctgtagttgttcctccattcttgcaaccagaagttatgggcgtaagcaaggtgaaagaggctatggctcccaagcataaggagatgcccttcccaaagtacccagtcgagccttttactgagagtcaaagtcttacccttactgatgtggaaaacctgcaccttccactccctcttctgcaatcttggatgcaccagccccatcaaccattgccccctaccgttatgtttccaccacaatctgttctttcattgtctcagagtaaagtactgcctgtacctcagaaagctgttccctatccccagcgcgatatgccaattcaagcattccttttgtaccaggagccagtattgggccccgttagaggtccattccctataattgtt

SEQ ID NO: 410 - DNA, 672 bp, synthetic construct
  source 1..672: mol_type = other DNA
atgaaggtgctcatacttgcttgccttgtggcattggctctggcacgcgaactggaggaactcaacgtacccggcgagattgttgaatcactgtctagcagtgaagagagtatcacccgcataaataaaaaaatcgagaaatttcaaagtgaggaacaacaacaaaccgaagacgagttgcaggataagatacatccatttgcacagacccaaagccttgtctatcctttccctggacccatacctaacagtctcccccagaacatccctccacttacacaaactcccgttgtagttcctccatttttgcaaccagaggtaatgggagttagcaaagtgaaggaggcaatggcacctaagcataaagaaatgccatttcctaaatacccagttgaaccttttactgaaagccaatcactgaccttgacagatgttgagaacctccacctcccactcccactcctccagtcatggatgcatcaacctcaccagcccctgccccctaccgttatgtttcctcctcagagcgtgctctcactgtctcagtctaaggttctcccagtgcctcagaaggctgttccctatccccagagagatatgcccatccaggcattccttttgtatcaagagccagtcctcggacctgtacgcggcccttttccaatcatagtg

SEQ ID NO: 411 - DNA, 672 bp, synthetic construct
  source 1..672: mol_type = other DNA
atgaaggttcttattttggcttgtctcgtcgccttggctctggcaagagagcttgaggaactgaatgtgcctggggaaattgtagagagtttgagtagtagcgaagaaagtataaccaggataaataagaaaatcgaaaaattccagagtgaagagcagcaacaaacagaagacgaacttcaagataagatacatcccttcgctcagactcaaagcttggtttatcccttccccggcccaatcccaaactctttgcctcaaaacatccccccactgacccagacaccagtagtggtgccaccatttcttcagccagaagtcatgggcgtctccaaggtgaaggaggcaatggctccaaaacacaaagagatgccctttcctaaataccccgttgaaccattcactgaatcacaaagtcttacactgactgacgtggaaaacttgcacctccctctccccttgctgcagtcctggatgcaccaacctcatcagccacttcccccaacagtcatgtttccaccacaaagtgtactttccttgagccagagtaaggtcttgccagttccccaaaaagctgttccctatccacagagggatatgccaattcaggcttttctgctttatcaagaacccgttctgggccctgttaggggaccttttcccatcatcgtt

SEQ ID NO: 412 - DNA, 672 bp, synthetic construct
  source 1..672: mol_type = other DNA
atgaaggtactcattttggcttgcctggtggctttggcactcgcccgtgagctggaagagcttaacgtgcccggagaaatcgttgagagcctgtcatccagtgaggagtcaataacacgtattaacaagaaaatcgagaaattccaaagcgaagaacaacagcaaaccgaggatgaactccaggacaagattcatcccttcgcccagactcaatctttggtctaccctttccccggaccaatacccaatagcctcccccaaaacataccccctttgacacagacccctgtcgttgttccacccttccttcagccagaagtaatgggagtatctaaagtaaaagaggctatggctccaaaacacaaggaaatgccttttcccaagtacccagtcgagccattcacagagagtcaatcacttaccctcacagacgtagaaaatctccacctcccattgccactcctgcagagctggatgcaccagccacaccaacctttgcctcctactgttatgtttccccctcagtctgtacttagccttagtcaatccaaggttcttcctgttccccaaaaggctgtaccctacccacagagagacatgcccattcaagccttcttgctctatcaggagcccgtcttgggccccgtgcgcggtccatttcctattatcgtt

SEQ ID NO: 413 - DNA, 672 bp, synthetic construct
  source 1..672: mol_type = other DNA
atgaaggttttgatactggcttgcttggtagccctcgcccttgcccgtgagttggaggagctgaacgttcccggagaaatcgttgagtctctgagcagttccgaggagagcattacaaggataaataaaaaaatagaaaaattccagagtgaggaacaacagcagacagaagatgaattgcaagataagattcaccccttcgcacaaacccagtccctggtgtacccatttccaggacccatacccaattcattgccccagaatataccacccctcactcaaactcccgtggtggtccccccatttttgcaacccgaagttatgggcgtttcaaaagttaaggaagcaatggcccccaagcataaagagatgccttttccaaaatatcctgttgagccttttactgagtcccagtcacttacccttacagacgttgaaaatctccacttgcccctcccactcctccagagttggatgcaccagccacatcagcccttgccacccactgtcatgttcccaccacaatctgtgctcagtctgagccagtcaaaagttctcccagtcccccaaaaggccgtaccctatcctcagcgcgacatgccaatccaagcctttctgctttaccaagagcctgtactgggtccagttagaggcccatttcctataatagta

SEQ ID NO: 414 - DNA, 672 bp, synthetic construct
  source 1..672: mol_type = other DNA
atgaaagttctcattttggcttgcttggtagctctggcactggccagagaactggaggaattgaatgtacctggagaaatcgtggagtcattgagtagctctgaggaatctattacacgcatcaacaaaaagatagaaaagtttcaaagtgaagagcaacaacaaacagaggacgagcttcaggacaagattcatccatttgcacagactcagtcattggtctacccctttcccggccctatacctaattctttgccccaaaacattccaccccttacccaaacccccgtcgtcgtccctcctttcttgcaacccgaggttatgggtgtgtcaaaagttaaagaagccatggctcccaaacataaggaaatgcctttcccaaagtaccctgttgaaccatttaccgagagtcaatcattgaccctcacagacgtagaaaatcttcaccttcctctcccccttctgcagtcctggatgcaccaacctcaccaacctctgcctcccacagtgatgttccccccacagtccgtactctccctgagtcaatctaaagttttgcccgtgccacaaaaggccgttccttatccacagagagatatgcctatccaggcatttttgctgtatcaagaacccgtattggggcctgtacgcggacctttccctataattgtg

SEQ ID NO: 415 - DNA, 672 bp, synthetic construct
  source 1..672: mol_type = other DNA
atgaaagtactgatcctcgcctgtctggttgctctcgctctcgcaagagaactcgaagaattgaatgtgcctggtgaaattgtcgaatcactcagctcatctgaggaatctatcaccaggataaacaaaaagatagagaaattccagagcgaggagcaacagcagactgaagacgaacttcaagataagatccacccttttgctcagactcaaagcctggtctaccccttccctggtccaatccctaactcattgccacagaacattccacctctcactcagactccagtggttgtccccccattcttgcagcccgaggttatgggagtaagtaaagttaaagaggctatggcccctaaacataaagagatgccttttcccaagtaccctgtggaaccattcactgaaagccaatcattgacacttaccgatgtagaaaatttgcatctgcccctccctctgttgcagagttggatgcaccaacctcaccagccacttccacccaccgtgatgttcccaccacaatccgtattgtcacttagccaaagcaaagtgctcccagtccctcaaaaggccgtcccctatccacaacgcgacatgccaatacaggccttccttctttaccaagagcctgtgctgggtccagtaagaggaccattccccataatcgtc

SEQ ID NO: 416 - DNA, 672 bp, synthetic construct
  source 1..672: mol_type = other DNA
atgaaggttttgatcctggcctgcttggttgctttggccctggccagggagttggaagagcttaatgttcccggtgagattgtcgaatcattgtcttcctccgaagagagcatcacccgtattaacaaaaaaattgaaaaattccagtccgaggaacagcagcagactgaagatgaactgcaagataaaattcaccctttcgctcagactcagtcactcgtctacccttttcctgggcctataccaaacagtctcccacaaaacatacctcctctcacacagactcccgttgtggttcctcctttccttcagcctgaagtgatgggagtcagtaaggtgaaagaagctatggccccaaagcacaaggaaatgcccttccccaaataccccgttgaacctttcactgaatcacaaagtctcacccttacagatgttgaaaatttgcaccttcctcttcctctgttgcagtcctggatgcatcaaccacaccaaccactccctcccaccgttatgttccctccccaatccgtactttcactcagtcagagcaaagtcctgcccgtgcctcaaaaagccgttccatatcctcagagggacatgcctatccaagcctttctgctgtatcaagagcccgtgcttggtccagtccgtggaccattccccataatcgta

SEQ ID NO: 417 - DNA, 672 bp, synthetic construct
  source 1..672: mol_type = other DNA
atgaaggtactcatccttgcttgcctcgtagctcttgcactcgcaagagaactcgaagagcttaacgtcccaggagaaattgtcgagtccctgagcagctctgaggagtcaattacccgcataaacaaaaaaatcgagaagtttcagagcgaggaacaacagcaaacagaggacgaattgcaagacaaaattcacccttttgcacagacacagagcctggtctacccattcccagggccaatacccaactctctcccacagaatataccacctctcactcagaccccagtagtcgttcctccattcttgcaacccgaggtcatgggggtctccaaagtaaaagaagctatggcaccaaagcataaagagatgccttttcccaagtacccagtcgaaccattcaccgaatcccaatcactcaccttgactgatgttgaaaaccttcatttgccactccctctgctgcagtcttggatgcaccaaccacaccagcctcttccacctaccgttatgtttcctccccaaagcgtcttgtccctgtcccagtctaaggtactgcctgtcccccaaaaggcagtgccctacccacagcgtgatatgcccatccaagccttccttctctatcaggagcctgtcctcggacctgtgaggggaccctttcctataatcgtc

SEQ ID NO: 418 - DNA, 672 bp, synthetic construct
  source 1..672: mol_type = other DNA
atgaaggtactcattctggcttgcctcgttgcccttgcactcgctagggaacttgaggaactgaatgttccaggggagattgtggaaagtctctccagttcagaagagagtattacccgtataaacaaaaagatcgagaaatttcaatcagaggagcagcagcagaccgaagatgagttgcaagacaagattcacccttttgctcaaacacagtctttggtttatcctttccccggaccaattcctaatagcctgccacagaatatcccccccttgacacaaactcctgtggtcgtccctccttttcttcaacccgaggtgatgggtgtaagcaaggtgaaggaagcaatggcacctaaacacaaggagatgccctttcccaagtatcctgtcgaaccttttactgagagccagtctcttactcttaccgacgtagagaatcttcatctcccactgccactcctccagagttggatgcaccagccacaccaacctctcccccctaccgtcatgttcccaccccagtcagtccttagtctttctcagtctaaggtcctgcccgtcccacagaaggcagtcccatatccccagagggacatgccaatacaagcatttctgttgtatcaggaacctgtcctgggaccagttagaggaccatttcccattatagtg

SEQ ID NO: 419 - DNA, 672 bp, synthetic construct
  source 1..672: mol_type = other DNA
atgaaagtattgatactggcttgtctggtcgcccttgcactggcaagggaacttgaagaactgaatgtaccaggggaaatagtagaaagcctgtcatcctctgaagagtcaataacaaggatcaataagaagattgaaaagtttcaatctgaggaacagcagcagactgaagatgagctccaggataagatacacccattcgcacagacccaaagcctcgtctatccattccccggccccataccaaactctttgccacagaacatccctccactgactcagacacctgttgtggtgcccccattcctgcaacctgaggtcatgggggtttcaaaggtaaaagaggcaatggccccaaagcacaaagaaatgccttttcccaaatatcccgtggagcctttcacagaaagtcagtctttgaccctcaccgatgtagaaaacttgcatcttccccttccccttcttcagagctggatgcaccaacctcaccagccactccctcctacagtgatgttcccccctcaatctgttctgtccctgtcacaatctaaagtattgcccgttccccagaaggctgtgccttatccccagcgcgacatgcctatacaagcttttcttttgtaccaggaaccagttcttggtccagtacgcggaccctttcctattatcgtc

SEQ ID NO: 420 - DNA, 672 bp, synthetic construct
  source 1..672: mol_type = other DNA
atgaaagttctgatcctcgcatgccttgttgctcttgctctggcccgcgagctcgaggaattgaatgttcccggtgagattgttgagtccctctcctcatctgaagaaagcataactcgtataaacaaaaagattgagaaattccaaagcgaggaacaacagcagaccgaagatgaactccaagacaaaatccacccattcgctcagacccagtctctcgtatatccattccctgggccaattcctaacagcctgcctcaaaatatcccacccctcacacagactccagttgtggtcccacccttcttgcagcctgaggtaatgggggtttcaaaggtgaaagaagctatggcccccaaacataaggagatgccctttccaaagtaccccgtcgaaccatttacagagagccaaagccttactctgacagatgtagagaatttgcatcttccacttccacttcttcaaagctggatgcaccaaccccaccaaccacttccccccactgtaatgttccctccacaatccgtattgtctttgtctcaaagcaaagttttgcccgtgccacaaaaagcagttccttatcctcaacgtgacatgccaattcaagcattcctgctgtaccaggaaccagtccttggcccagtaagagggccttttccaatcatcgtt

SEQ ID NO: 421 - DNA, 672 bp, synthetic construct
  source 1..672: mol_type = other DNA
atgaaagtgctgatcctggcatgtctcgttgcactcgccctcgcccgtgaacttgaggaacttaacgtgcctggggaaattgttgagtctcttagttctagtgaagaaagtatcacacgcataaacaagaaaatcgagaaatttcagtctgaggaacaacaacagacagaggatgagcttcaggacaagatccacccctttgctcaaacacagagcctcgtatacccatttccaggccccatccccaatagccttcctcagaatatacccccattgacccagactcctgttgtcgttcccccattccttcaacctgaggtgatgggcgttagcaaggtgaaagaggctatggcaccaaaacataaggaaatgccttttcctaaataccctgtggagccatttacagagagtcaaagtcttaccttgacagacgtagaaaatctccaccttcccctccctttgctccaatcatggatgcaccagccacaccaaccccttccaccaacagtaatgttcccccctcagagtgtactgagtctctcccaatctaaagtgctcccagtaccacaaaaggctgtgccctatcctcagagagacatgcccatccaagctttcctgctgtaccaggagccagtgcttggacctgtgaggggaccctttcccataatagtg

SEQ ID NO: 422 - DNA, 672 bp, synthetic construct
  source 1..672: mol_type = other DNA
atgaaagtgttgattctggcttgccttgtagcattggcattggctagagaactcgaagagcttaacgtacctggcgaaatcgttgaatctttgtcatctagtgaggagagtatcactagaatcaataagaagatcgaaaagtttcaatcagaggagcaacaacagactgaggatgagctgcaagataagattcatccttttgcccaaacacagagtttggtttacccctttcccggccctataccaaacagcctcccccaaaacatacccccattgacccaaaccccagtagtggtacctccttttctccagccagaggtgatgggggtttctaaggtgaaggaggctatggcaccaaaacacaaggaaatgccctttcccaagtaccctgtagagccttttactgagagtcaatcactcacactcactgacgtagagaacctccatctccctcttcccttgttgcagtcatggatgcatcaacctcatcagcctttgccccctactgtgatgttccctccccagtccgtgcttagcttgtcacaaagcaaagttctccccgtaccccaaaaggccgtcccctacccacaacgtgacatgccaatacaggcctttcttctttatcaagagccagttcttggacctgttaggggtccatttccaattattgtc

SEQ ID NO: 423 - DNA, 672 bp, synthetic construct
  source 1..672: mol_type = other DNA
atgaaagtgcttattttggcctgtctggtcgcactcgctcttgcacgcgaattggaggagttgaacgtaccaggggaaattgtggaatcattgagctcaagtgaagaatccatcactcgcatcaacaagaaaatagagaaatttcaaagcgaagagcaacaacaaactgaggatgaactccaagataagatccatccctttgctcagacacaaagtttggtatatccctttccaggtccaatacccaattctcttccacagaatatacctcctctcacacaaacacccgtggtagttcctccttttctccagccagaagtgatgggggtttctaaagtcaaagaggcaatggcccctaaacataaggagatgccattccctaaatatcctgtcgaaccttttactgagagccagagtctcacactgactgacgttgagaacctgcaccttcccttgccattgcttcaaagttggatgcaccaaccacaccagccactcccacctacagttatgtttcctccacaatcagttctttcactgtctcaatctaaggtgcttcccgtacctcaaaaagccgtcccttatccccaaagggacatgcctatacaggcatttctcctttaccaggagcctgtcctgggaccagtaaggggtccatttcccatcatagtg

SEQ ID NO: 424 - DNA, 672 bp, synthetic construct
  source 1..672: mol_type = other DNA
atgaaggttctgattttggcatgtctggtggctttggccttggcaagggaattggaagaattgaacgtgccaggtgaaatcgtagagtccctctcatccagtgaggaaagcataacacgtattaacaagaagatagagaagtttcaatcagaggagcaacaacagactgaggacgagcttcaggacaaaattcacccattcgctcagactcaatcactggtgtatcccttcccagggccaatacctaattccctgccccaaaatataccacccttgactcagaccccagttgtagtgcctccttttttgcaacccgaagtaatgggagtttccaaggtaaaggaagcaatggctcctaaacataaagaaatgccatttcctaagtacccagtcgagcccttcacagagagccaatccctcactttgactgacgtagaaaatctgcaccttccacttccactcctccaaagttggatgcaccaaccccatcaaccactccctcctaccgttatgttcccaccacagagcgttctcagtcttagtcaatccaaagttctcccagtgccccagaaggctgtaccctaccctcaacgcgatatgcctatccaggcatttctcttgtaccaagagcctgttcttggtcctgtcagaggcccattccctattattgtt

SEQ ID NO: 425 - DNA, 672 bp, synthetic construct
  source 1..672: mol_type = other DNA
atgaaagtccttatattggcttgccttgtcgcactcgccctcgcccgcgagcttgaagaattgaacgtaccaggtgaaatcgtagagagtctgtcatccagcgaggaatccatcactaggattaacaaaaaaatcgagaagttccaatccgaggaacagcaacaaaccgaggacgagttgcaggataagatccacccttttgcccagactcaatcactggtatatccattccctggaccaataccaaactctctgccacaaaatatccccccactcacacagacaccagtcgtggtacctcccttcctgcagccagaggtgatgggggtctctaaagtaaaggaagctatggctccaaagcacaaagaaatgcccttcccaaaatatccagtagaaccattcaccgaaagtcagagtttgactctcacagatgtcgagaacttgcatttgcccctccctctcttgcagtcatggatgcaccagccacatcaacccctccctcccacagttatgttcccacctcaatctgtgctttccctgagtcaatccaaagtcttgccagtaccacagaaggccgtcccctatccacaaagggatatgcccattcaggcattccttctttaccaggaacccgttcttggtcctgtcagaggcccatttcctatcattgta

SEQ ID NO: 426 - DNA, 672 bp, synthetic construct
  source 1..672: mol_type = other DNA
atgaaggtgctcatccttgcttgtcttgtcgccttggccctggcaagagaactcgaggaattgaacgtaccaggtgaaattgtggagagtctgtcatcttctgaagaaagcataactaggattaacaagaaaatcgaaaagttccagtctgaagaacagcagcaaaccgaagacgaattgcaagacaaaatccacccatttgcacagacacaatcattggtgtatccctttcctggacccatacctaacagcctcccacagaatataccacccctgacacagacacctgtagttgtacctcctttccttcaaccagaggtaatgggcgtgtccaaggtaaaggaggccatggcccccaagcacaaggagatgccattccccaaataccccgtagaaccatttaccgagtctcaatcactcaccttgacagatgtagagaatctgcatctccctttgcctctccttcaatcttggatgcatcaacctcaccagccattgccacccacagtcatgttcccacctcaatccgtcctttctctttcccagtcaaaggtcctccccgtaccccagaaagccgtaccttatccacagcgtgatatgcctattcaagcatttctcctgtatcaagagccagtacttggcccagtgcgcggtcctttcccaataatagta

SEQ ID NO: 427 - DNA, 672 bp, synthetic construct
  source 1..672: mol_type = other DNA
atgaaagtattgatcttggcatgtctcgtggctttggcactggcccgcgaactggaggaactcaacgttcctggtgagatcgtggaatctctcagttcatctgaagaatctattacacgtataaataaaaagatcgagaagttccagtctgaagaacagcagcagactgaggacgagcttcaggataaaatccacccttttgctcagacccagagtttggtttacccatttcccgggccaatcccaaattctcttcctcaaaacattcctccattgacacaaaccccagttgtcgtgcctccattcttgcagcctgaagtaatgggagtgagcaaagtcaaggaggctatggcccctaaacacaaggaaatgccatttcctaaatatcccgtggagcctttcactgagtcacagagtctgacactgacagacgtggaaaaccttcacctcccccttcctctgcttcaaagttggatgcaccagccccatcaacctttgccccctactgtaatgtttcctccacaatctgtattgtctctttcccaatctaaagtacttccagtgccacaaaaagcagttccctacccacagagggacatgcccatccaagccttcctgctttaccaggaacctgtgctcggtccagtacgcggtcctttccctatcatagtt

SEQ ID NO: 428 - DNA, 672 bp, synthetic construct
  source 1..672: mol_type = other DNA
atgaaagtgttgatattggcatgtcttgtggccctcgctcttgcacgcgaactcgaagagttgaacgtccctggagagatagtcgaatccctttcaagctcagaagagtcaataaccagaatcaacaaaaagatagagaagtttcagtcagaggaacaacaacaaaccgaagatgaacttcaagataagatacatccattcgcccagacccaatcactcgtttatcccttcccaggcccaatacccaacagtctgccccaaaatataccaccattgacacagaccccagtggttgtacctccctttttgcagcccgaagtcatgggtgtcagtaaagtcaaggaagccatggcacccaagcataaggagatgccatttcccaaatatccagtggagccctttacagaatcacaaagtctcacactgactgatgtagagaacttgcacctgccactgcctctcctgcagtcctggatgcaccaaccccaccagcctctgccccctacagtaatgttccccccacagtccgtgctctccctctcacagtcaaaggttttgcccgttccacagaaagccgtaccctatccccaaagagatatgcctatccaggcatttttgctttaccaggaacctgtactcggcccagtaaggggtcccttccctataatagtc

SEQ ID NO: 429 - DNA, 672 bp, synthetic construct
  source 1..672: mol_type = other DNA
atgaaagtacttattcttgcctgtctcgtagccttggcccttgctcgtgagctggaagaattgaatgtgcctggtgagattgtcgaaagcctgagttcttctgaggaatccattactcgtatcaataagaaaattgagaaattccagtcagaagagcaacaacagactgaagacgagttgcaggataaaatacacccttttgcccaaacccaatcactggtctaccccttcccaggacctataccaaattctctcccccagaacatcccccctctgacacagacaccagtcgtcgtacctccctttctccagcctgaagtaatgggcgtcagtaaagtcaaagaggcaatggcccctaaacacaaggaaatgccatttcccaagtacccagttgagccatttacagagtctcaaagcctcactctgactgacgttgaaaatctgcatttgcctctgccactgttgcaatcttggatgcaccaaccccaccaaccactcccaccaactgtaatgtttcccccacagagtgttttgtcattgtctcagtctaaagttcttccagtgccccaaaaagccgtcccttatccacaaagagatatgcccatacaggcatttcttctttaccaagagcctgtactcggaccagttcgtggaccttttcctattatagta

SEQ ID NO: 430 - DNA, 672 bp, synthetic construct
  source 1..672: mol_type = other DNA
atgaaagttttgatactcgcatgtctcgtggcactggcccttgcaagagaacttgaggagcttaatgtaccaggagaaatagtggaatctcttagctcttccgaagaaagtattaccagaataaacaagaagattgaaaagtttcagtccgaggagcagcagcaaacagaggacgaattgcaggacaaaatccatccattcgcacagacccaatctcttgtctacccatttcccggtcctattccaaacagcctcccacaaaatataccaccacttactcaaacacccgtcgtcgtaccacctttccttcagcctgaggtcatgggagtatccaaggttaaagaagctatggctcccaaacataaggaaatgccatttcccaaatatcccgtagaacctttcaccgaatcccaaagtcttaccctgactgacgtagaaaaccttcatcttcctctccccctgttgcagtcatggatgcaccagcctcaccaacctcttcctccaactgtaatgttccctccccaatcagttttgtccctgtcccagtccaaggtcttgccagttccacagaaggccgtgccttatccacaacgcgacatgccaatccaagcttttttgttgtatcaggaacccgtacttggacctgtaagggggccattcccaattatagtt

SEQ ID NO: 431 - DNA, 672 bp, synthetic construct
  source 1..672: mol_type = other DNA
atgaaggtgctgattctggcctgtcttgtagctttggcacttgcaagagaactggaagagttgaatgttccaggggagattgtcgagtctctgtctagttcagaggaaagtataacacgcataaataagaaaatagagaaatttcaatctgaggaacagcaacaaactgaagacgaactccaggataagatacatcccttcgctcaaactcaatccttggtgtaccccttccctggccctatacctaatagtctcccacaaaatataccacctctgacccagactccagttgtcgtaccccctttcctccaaccagaagtaatgggtgtctccaaagttaaagaggcaatggcccctaaacacaaggaaatgcctttcccaaagtatccagtagaacctttcactgaatcccaatcattgacactgactgatgtagaaaaccttcatctcccattgcctttgttgcagtcctggatgcaccagccacatcagcccttgccaccaaccgtgatgttcccaccccaatccgtactcagcctcagccaatctaaagtattgcccgtaccacaaaaagcagttccttacccccagagagacatgcccattcaagccttcctgctgtaccaagagcctgtcctgggtcccgttaggggtccttttccaataattgtc

SEQ ID NO: 432 - DNA, 672 bp, synthetic construct
  source 1..672: mol_type = other DNA
atgaaggtattgatattggcttgtttggttgctttggcactcgctcgtgaactggaggaactgaatgtcccaggggaaattgtcgagagcctgtcttcatccgaagagagtatcacacgtataaacaaaaagatagagaagttccagagtgaagagcagcagcaaaccgaggatgaactccaagataagatccatcctttcgcccagactcagagtctcgtatatccttttccaggccctattcccaactctttgcctcaaaacatccctcctttgacccagacaccagtggtggtcccaccctttctgcagcctgaggttatgggcgtaagtaaggtaaaggaagcaatggctcctaagcacaaggagatgccctttcccaaatatccagtagagcccttcactgaaagccaatctctgactttgaccgacgtggaaaacctccatctgcctttgccattgctgcaatcctggatgcaccagccacatcagcctctgcctcccactgtgatgtttcctcctcaatccgtcctttccctcagtcaatctaaggtcttgccagtgcctcaaaaagccgtgccatatccccaacgcgatatgcccatacaggcttttctcctttatcaagaacccgtgctgggacccgtcagagggccattcccaataatcgtt

SEQ ID NO: 433 - DNA, 672 bp, synthetic construct
  source 1..672: mol_type = other DNA
atgaaagtgttgatactggcttgtctggtagctctggcactcgccagagaacttgaggagctcaacgtgcccggagagatcgtagaaagcctctcatcaagcgaggagagcataactagaattaataagaagatcgagaaatttcagtctgaagaacagcagcaaactgaagacgaacttcaagataaaatacatccctttgcacaaacacaaagtctggtctacccattcccaggtcccatacctaattcactgcctcagaacatccctcctttgacacaaacacccgttgttgtcccaccttttcttcaacctgaagtgatgggagtatccaaggttaaggaagcaatggcacccaagcataaagaaatgccattccctaaatatcccgtggagcccttcaccgaaagccaatctctcaccctcactgatgtcgagaatcttcaccttccactccctttgctccaatcttggatgcaccaaccacaccaaccacttccacctaccgttatgtttccaccacaatccgtcctctctttgtctcaatcaaaagtgctccctgttccacagaaggcagtgccatatcctcagagagacatgccaattcaagcatttctcctgtaccaagagcctgtgcttggtccagttagagggcccttccccattatagtt

SEQ ID NO: 434 - DNA, 672 bp, synthetic construct
  source 1..672: mol_type = other DNA
atgaaagtgcttatcctcgcttgtttggtcgcccttgctctcgcccgcgaactggaagagcttaatgtgccaggagaaatagtagaaagtctttcatcttccgaggagagtatcaccaggattaacaaaaaaatagaaaagtttcaatcagaggagcaacagcaaaccgaagacgaattgcaggataagatccatccattcgcccagacccaaagtctggtttacccattcccaggccccataccaaatagcctgcctcaaaatattccccccctgacacaaacacccgtcgtagtccctccttttttgcagcctgaagtaatgggagtaagcaaagttaaggaagcaatggctcccaagcataaagagatgccttttcctaaataccccgtagaacctttcaccgagtctcagagcctgacacttactgatgttgaaaacttgcaccttcctttgcctctcctccaaagttggatgcaccagccacatcaacctctgccacccactgtaatgtttcctccccagtcagtcctcagtctgtcccagagtaaagtattgcccgtgccccaaaaagcagtgccctacccccagcgtgatatgccaattcaagccttcctgctttatcaggaacccgttctgggtccagttcgtgggccattccccattatagta

SEQ ID NO: 435 - DNA, 672 bp, synthetic construct
  source 1..672: mol_type = other DNA
atgaaagtcttgatactggcttgtctcgtggccctcgctcttgcccgtgagttggaagagcttaatgttccaggagaaattgtcgaatccctcagtagcagcgaggagtcaatcaccaggataaacaaaaagattgagaagttccagagtgaagagcagcaacagactgaggatgaattgcaggacaaaattcaccccttcgctcaaacccaatcattggtctatccattccccggacctatacctaacagtttgccccaaaacatcccccctttgactcaaacacctgtcgtcgtcccaccttttctccaaccagaggtgatgggagttagtaaagtaaaggaggcaatggctcccaaacacaaggagatgccattccctaagtatcccgtagagccattcactgagtcccagtcactcacacttacagatgttgaaaatctgcacctgccattgcccctcctccagagttggatgcaccagcctcaccaacctctgccacctactgtaatgtttcctcctcaatccgtattgtctttgagtcaatcaaaggttttgcccgtccctcaaaaagctgtgccataccctcaacgcgatatgcccattcaggccttcttgttgtaccaagagcctgtgttgggacccgtgagaggccctttccccataatagtt

SEQ ID NO: 436 - DNA, 672 bp, synthetic construct
  source 1..672: mol_type = other DNA
atgaaagtcctgatccttgcctgcctcgtcgctctcgctctcgctcgcgaattggaagaattgaacgtccccggcgaaattgtcgagtcactgtcaagctccgaggagtcaattactcgcataaacaaaaagattgagaaatttcaatccgaagaacaacagcagacagaggacgaacttcaggataagattcaccccttcgcccagacacagtctttggtgtatccatttccagggccaattcccaattctcttccccagaatatacctccactcacacagaccccagtggtggtgccaccttttttgcaacccgaagtaatgggtgtatcaaaggtaaaagaggctatggctcctaagcacaaggagatgcctttcccaaagtaccccgttgagccttttacagagtcccagtctctgaccctgaccgacgttgaaaacctgcatctcccattgcctcttctccagtcatggatgcatcagccacaccaacccttgcctccaactgtaatgttccctccacaatctgtcctgagtctgtctcagtcaaaagtgctgcccgttccacagaaagccgtcccttatccacaacgtgatatgcccattcaggctttcctcctttaccaggagcctgtgcttggtcccgtaagaggcccctttcccattatagtg

SEQ ID NO: 437 - DNA, 672 bp, synthetic construct
  source 1..672: mol_type = other DNA
atgaaggttttgattctcgcctgtttggttgctttggctttggctagggagctcgaagagctgaatgtgccaggtgaaattgtggagtcattgagctcaagtgaagaaagcattaccagaataaataagaaaattgaaaaattccagagtgaggagcaacaacagacagaggatgagcttcaagacaagattcacccttttgcacaaacacagagcctggtttatccatttcccggtcctatccctaactctttgccacagaacattccaccattgactcagacacctgtagttgtacctccttttctccagcctgaggtaatgggtgtttccaaagtaaaagaagctatggcccccaagcataaggagatgccctttccaaagtaccctgtcgagccttttactgagagtcagtctttgaccctgacagacgttgagaatctccatctcccactgcctctcctccagtcctggatgcaccaaccccatcaaccattgcccccaacagtaatgttcccccctcaatccgtcctctcacttagtcaaagtaaggtcctcccagtcccccaaaaggcagtaccttatcctcagagggacatgcccatacaggcatttctcctttatcaagaacctgttctcggccctgttcgcggaccattccccattatagtc

SEQ ID NO: 438 - DNA, 672 bp, synthetic construct
  source 1..672: mol_type = other DNA
atgaaagttctgatcttggcttgtttggttgcacttgccctcgcaagggaactcgaagagttgaacgtcccaggtgagattgttgaaagtttgtcatcatcagaagagtctattacccgtataaataagaaaattgaaaaattccaatctgaggagcaacaacagaccgaagacgaactccaagataagatccaccctttcgcacaaacccaatcactggtctacccatttcctggacctattccaaacagccttccccaaaacatcccacccttgacccaaacacccgtagtcgtacctccatttttgcagcccgaagtaatgggtgtgtccaaggtcaaggaggcaatggctccaaagcataaggagatgccctttccaaaatatcctgtggagccttttacagagtcacaatctcttaccctcactgatgtagagaacttgcatctgcccctcccactccttcaatcatggatgcaccagcctcatcaacccctgcccccaacagtaatgttccctccacaatccgtactctcactttcacaatctaaggtgctccctgtgccccaaaaggctgtcccatatccccaacgcgatatgcccattcaggcatttctcctctatcaagagccagtccttggcccagtgcgcgggccttttcccatcatcgtg

SEQ ID NO: 439 - DNA, 672 bp, synthetic construct
  source 1..672: mol_type = other DNA
atgaaggttcttattttggcctgccttgttgctttggccttggcacgtgaactggaggagcttaatgttcccggagagattgttgaatccctcagtagtagtgaagaatctatcaccaggattaacaaaaagatcgaaaaatttcagtctgaagagcagcagcagaccgaagatgaactccaagacaaaatccacccattcgctcagactcagagcctggtctacccttttcccggtcccatacccaacagcctcccccagaacataccacctctcacacaaactcctgtggttgtcccccccttcttgcaaccagaagttatgggtgtctccaaggtaaaggaggcaatggcacctaaacacaaagaaatgcctttcccaaaatatcctgtagaaccttttactgaatcacaatccttgaccctgaccgatgttgaaaacttgcacctccctctccccctgttgcaatcctggatgcaccagccacaccagccccttcccccaaccgtcatgttccctccacaaagcgtactgtcactttctcaaagcaaagtgcttccagtgcctcaaaaagctgttccctaccctcaacgtgacatgcctattcaagctttccttctctatcaggagcctgtgctgggaccagtgcgtggaccattccccatcatcgtc

SEQ ID NO: 440 - DNA, 672 bp, synthetic construct
  source 1..672: mol_type = other DNA
atgaaagtactgatcttggcatgtttggtggcactcgctctggctcgtgaacttgaggagctgaacgtcccaggggaaatcgttgaatcactctccagttccgaggagagcattactcgtattaataaaaaaatcgaaaaatttcaaagtgaggaacagcaacaaacagaagatgagttgcaggataaaattcaccccttcgcacaaacacagagtcttgtgtacccatttcctggaccaattcctaatagtctcccacagaacattcctccactcacacagacccccgtcgtggttccaccatttcttcaacccgaggtaatgggtgtctcaaaggttaaggaagcaatggctccaaaacataaggaaatgccttttcctaagtatcccgttgagccctttaccgagtctcagagtctgacactgacagacgtagaaaatcttcacttgcccttgccccttcttcaatcttggatgcaccagccccatcaaccactgcctcccacagtgatgtttcctccacaatcagtactcagcctgtcccaatccaaggttctcccagtacctcaaaaagccgtgccctatccccagcgcgatatgcctatacaggctttcttgctttatcaggagcccgtgttgggtcctgtgaggggaccattccctatcatcgtt

SEQ ID NO: 441 - DNA, 672 bp, synthetic construct
  source 1..672: mol_type = other DNA
atgaaggtactcatacttgcctgtctcgtagcacttgctctcgcaagagaacttgaggagcttaatgttccaggagaaatagtggagtcccttagctctagtgaggaatccattactaggataaataaaaagattgaaaagttccagagtgaagagcaacagcagacagaagacgagttgcaagacaaaattcaccccttcgctcaaacacagtccctggtgtacccttttcccggtcccattcctaatagcttgccacaaaacatacccccccttacacagactcctgttgtcgtgccaccattcctgcagcctgaggtcatgggggtatctaaggtgaaagaagctatggcccccaaacataaggagatgccattccctaagtatccagtagagccattcactgaatcacagagcctcactcttacagacgtagagaacctccatcttcccttgcccctcctgcaatcttggatgcatcagcctcatcaacctcttcccccaacagtcatgtttccccctcagtctgtactctcactcagccaaagcaaagtcctccctgtaccccaaaaggcagtcccatatccccaaagagacatgcctatccaggcctttttgttgtaccaggagccagtcctcggcccagttaggggaccctttcctataatcgtg

SEQ ID NO: 442 - DNA, 672 bp, synthetic construct
  source 1..672: mol_type = other DNA
atgaaagtgctcattctcgcttgtctggtcgctcttgcacttgcacgtgaactcgaagaattgaatgtccctggtgaaatcgttgaatccctgtcatcctctgaggagtcaatcactaggattaataagaagatcgaaaaatttcagagcgaggaacaacagcagaccgaggatgaactgcaagataaaatccaccccttcgcacaaacccaatccttggtttacccattcccaggtcccataccaaactcactcccccagaacatccccccacttacacaaactcctgttgtagtccccccctttctccagccagaagtcatgggagtttctaaggtaaaggaagcaatggcacccaaacataaggagatgccttttcctaagtacccagttgaacccttcactgaaagccagagtctcactttgacagatgtagaaaatctgcatctgcccttgcctctcctccagtcatggatgcatcaaccacatcaaccccttccacctactgtcatgtttccccctcagagtgtcctcagtctttctcaaagcaaagtactgcccgttccccaaaaggccgtcccatatccacagagagatatgccaatacaggcatttttgctctaccaagaacctgtattgggacctgtacgtggcccatttcctatcatcgta

SEQ ID NO: 443 - DNA, 672 bp, synthetic construct
  source 1..672: mol_type = other DNA
atgaaggtgttgattcttgcctgtttggtcgcactcgctcttgctagggaattggaagagcttaatgtacccggcgaaatagtcgagagcctgtcatctagcgaagagtcaattacccgcatcaacaagaaaatagaaaaattccaatccgaagagcagcagcagactgaagacgagctgcaagataaaatccacccatttgctcagacacaaagcctcgtttatccattcccaggacctatacctaattcactgccccaaaatattcctcctctcactcagacacctgtagtagtacctccttttctccagcctgaagtgatgggtgtttcaaaggtcaaagaagctatggctccaaaacataaggaaatgccattccccaaataccctgtcgagccattcactgaatcccagtctctcacactcaccgatgtcgagaatttgcaccttcctctcccactgcttcagtcctggatgcaccaaccacaccaaccattgccacccacagtaatgtttcctccccaaagtgttctgtctctctcccaaagcaaagtactgccagtcccacaaaaagcagtaccttatcctcagcgtgacatgccaattcaggcttttcttctctatcaggagcccgtcctgggccctgttcgtggaccttttccaataattgtg

SEQ ID NO: 444 - DNA, 672 bp, synthetic construct
  source 1..672: mol_type = other DNA
atgaaagtactcattctcgcatgtttggtggctttggcccttgctcgtgaattggaagaattgaatgtacctggtgaaatagttgagagtctgagttcctcagaagagtctatcacacgtattaacaaaaagatcgaaaaatttcaatccgaggagcaacaacaaaccgaggacgaacttcaggataagatccatcctttcgcacagacccagagcctggtctacccattcccagggcctatcccaaactcactgccccaaaatattccccccttgactcaaacccccgtcgtagtacctccattcctccagcccgaggttatgggcgtctctaaggtaaaggaagctatggccccaaagcacaaagaaatgccctttccaaagtaccccgtagagccattcacagagagccaatcccttaccctcactgatgtcgaaaacctgcatctcccactccctttgttgcagtcctggatgcaccaaccccaccagccccttccccctaccgtcatgtttccaccacagtcagtcctttcattgagtcagtcaaaggtgcttccagttcctcagaaggctgtcccttaccctcagagggacatgcccattcaagcatttttgctttaccaggaacctgtgttgggtcccgtaaggggtccattccccatcattgta

SEQ ID NO: 445 - DNA, 672 bp, synthetic construct
  source 1..672: mol_type = other DNA
atgaaagtgctcatcctcgcatgcctcgttgctttggctcttgcccgcgagcttgaagaattgaacgtacccggcgagatcgtcgaaagtcttagtagctcagaagagagcattacccgcattaacaagaaaatcgagaaatttcaaagcgaggagcagcaacaaactgaggacgaactgcaagacaagatacatccattcgcccaaactcagagtttggtttatccattccctggacccataccaaactcactgcctcaaaacattccccccttgactcagaccccagtcgttgtccccccttttcttcaacccgaagtcatgggggtcagtaaagtgaaggaagcaatggctcccaaacataaagagatgccattcccaaagtatcctgttgaaccctttacagagtcacagtccctgacactgaccgacgttgaaaaccttcacttgccattgcctctgttgcaatcctggatgcatcagcctcatcagccattgccccccacagtcatgtttccacctcaaagtgttctgtcattgagtcaaagtaaggtcctccctgtaccccaaaaagcagtaccttatccacagcgcgatatgcctatacaggctttcctgctgtaccaggagcctgtcttgggtcccgtgcgtggacctttccctattattgtt

SEQ ID NO: 446 - DNA, 672 bp, synthetic construct
  source 1..672: mol_type = other DNA
atgaaggttctgattttggcttgcctggtggctcttgcacttgccagagagcttgaagagttgaatgtccccggtgaaatagtagaatcactgtcttctagtgaggagtcaatcacacgcatcaataaaaagattgaaaaatttcagagcgaggagcaacaacaaaccgaagatgaactgcaggataaaatccacccttttgcccaaactcagtccctggtgtacccctttccaggccctatcccaaactcactcccccaaaacatcccccctctgactcaaactccagtagtggtacccccttttctgcagccagaagttatgggagtgtcaaaagtaaaggaggctatggcacccaaacataaggaaatgcctttcccaaagtatccagttgaaccattcaccgaaagtcaaagccttaccttgaccgatgtcgaaaatctccacctgccactcccacttctccagagttggatgcaccagccccatcagcctcttccacctacagtgatgttcccaccccagagtgtgttgagcctgtcccagtccaaagttctccccgtgcctcaaaaagcagtcccttatcctcaaagagacatgcccattcaagcatttttgctttaccaagagccagtgttggggcctgttagaggcccattcccaataattgtg

SEQ ID NO: 447 - DNA, 672 bp, synthetic construct
  source 1..672: mol_type = other DNA
atgaaagtgctcattttggcttgtcttgtggcactcgctctggcacgtgagctggaagagttgaacgtcccaggagaaattgtggaatctctttcctcatctgaggaatccataaccaggatcaataagaaaattgagaaatttcaatcagaggaacagcaacaaactgaggacgagcttcaagacaagattcatccttttgcccaaacacaaagcctggtctatccatttcctggtccaatccccaattctttgccacagaacatcccccctctcacacagactcccgtagtggtgccccctttcttgcagcctgaggtgatgggagtaagcaaagtgaaagaggcaatggctccaaaacataaggaaatgccttttccaaagtacccagtcgagcccttcactgagtcccaaagtctcactctgaccgacgtagaaaatttgcatctccctctgcccctcctccaatcctggatgcaccaacctcatcagccacttcctcccaccgtaatgtttcctccccagtcagtcctctccctgtcacaatctaaagtgctccccgttccccaaaaggcagtcccctatccccagcgcgatatgcctattcaggctttcctgctctaccaggaaccagtattggggccagtgaggggcccattccctataatagtg

SEQ ID NO: 448 - DNA, 672 bp, synthetic construct
  source 1..672: mol_type = other DNA
atgaaagttctcattctggcatgcttggttgctcttgctctcgcccgtgaactcgaagagcttaacgtccccggagaaatcgtggaatctctctcttcttcagaagagtccataacaagaattaacaagaagattgagaaattccaatcagaagaacaacaacagacagaagatgaactgcaagataagatccatccttttgctcaaacccaatcccttgtttacccatttccaggtccaatccccaatagcctcccacaaaatataccccccctgactcagacccccgtggtagtccctccattcttgcaacctgaggtaatgggagtttctaaagttaaagaagcaatggcacccaaacataaggaaatgccttttcctaagtatcccgttgagccatttactgagtcacagagcctgacccttaccgacgtagaaaacttgcatttgcctctgcctctgcttcaatcctggatgcaccagccacaccaacccttgcctcccaccgtgatgtttccaccccaatctgttctctccctgtcccagagcaaagtattgccagtccctcagaaggctgtgccctatcctcaacgtgacatgcctatacaggcttttctgctttatcaggagccagtactcggcccagtacgtggaccatttcctattatagtt

SEQ ID NO: 449 - DNA, 672 bp, synthetic construct
  source 1..672: mol_type = other DNA
atgaaagttcttatcttggcttgcctggtcgctctcgcccttgcaagggaactggaggaacttaacgtccctggagaaattgtggaatcattgagttcaagtgaagaaagtatcactaggattaataaaaaaattgaaaaattccaatccgaagagcaacagcagactgaagacgagcttcaagacaagatccatccatttgctcagacacagtccctcgtgtaccccttccctggacccataccaaattctctgccacaaaacattccccccctgacccaaactccagtagtggtgccaccctttcttcagcccgaggtgatgggcgtatcaaaggtaaaggaagccatggcaccaaaacataaagaaatgccattccccaaatatccagtagaaccctttaccgaatcacaatcacttactttgaccgatgtcgagaacctccacttgcccctccccttgttgcaatcatggatgcaccagccacaccaacctctgccaccaacagtaatgtttcctccacagagcgtactctcactcagccaaagcaaagtattgccagtgcctcagaaggctgttccttatccacagcgtgatatgccaatccaagccttcttgttgtatcaggagccagtcctgggtcctgtgcgcgggccattccctattatcgta

SEQ ID NO: 450 - DNA, 672 bp, synthetic construct
  source 1..672: mol_type = other DNA
atgaaagttttgatactcgcatgtcttgttgccttggcccttgcccgcgaactggaagagttgaatgtgcctggtgagatagttgaatcactctcttccagtgaggaaagcattacccgcattaacaaaaagattgagaaatttcaatctgaagagcagcaacagaccgaagacgaactgcaagataaaatacaccccttcgctcaaacacaatctcttgtttatccattccccggaccaattcctaactcactgcctcaaaatatacctccccttactcagacccccgtagtagtacctcctttccttcagcctgaagtgatgggggtgtctaaggtcaaagaggccatggcacccaagcacaaggaaatgccattccctaagtatccagtagagcccttcacagaatctcaatctctcaccctcacagatgtagaaaacttgcatcttccacttcccctcctccagtcatggatgcatcaacctcatcaaccattgccacccactgtgatgtttccaccacagtctgtactgtcactttcacagagcaaggttctgcccgtgcctcagaaggctgtgccctatccacaaagagatatgcccatacaagcctttcttctctatcaagagcccgtcctcggacccgtgagggggcctttccctattatcgtc

SEQ ID NO: 451 - DNA, 672 bp, synthetic construct
  source 1..672: mol_type = other DNA
atgaaagtcctcattctggcctgtcttgttgccctcgccctggctcgcgaacttgaggagcttaacgtaccaggcgagattgtagaaagcctgtccagcagcgaagagagcattactagaatcaataaaaaaatcgagaagttccaatccgaagagcaacaacaaaccgaggatgaacttcaggacaagattcatcctttcgcccaaacacagtctctggtctatccctttcctgggccaatcccaaactccctccctcaaaatatcccccctctcacccagactccagtcgtggtgcctcctttccttcagcccgaagtcatgggagtgagtaaagtgaaagaggcaatggcccccaagcacaaggaaatgccttttcctaaataccccgtggagcccttcacagagtctcagagtttgacactgacagatgttgaaaatttgcatctccctctgcccttgcttcagtcctggatgcatcagccccaccaacctctgcccccaactgttatgtttcctcctcagtctgtactttccctgtctcagagcaaagtgctccccgtgccacagaaggcagtgccttatccacaaagagacatgccaatccaagcctttctgctctatcaggaacccgttcttggcccagttcgcgggcccttccctatcattgtg

SEQ ID NO: 452 - DNA, 672 bp, synthetic construct
  source 1..672: mol_type = other DNA
atgaaggtactgattcttgcttgtctggtcgccctggcattggcacgcgagcttgaagaattgaatgttcctggggagatcgttgaatcactctcatcctcagaagaaagtataaccagaattaacaagaagattgaaaaatttcaaagtgaggaacaacagcagactgaggacgaactccaggacaaaatccacccatttgctcaaacccaatctttggtatacccattccctgggccaatacctaactccttgccacaaaacatccccccactgacacaaacaccagtagtcgttccccccttcctgcaacctgaggtcatgggggtgtccaaagtaaaagaggcaatggcacctaagcataaagagatgccatttccaaagtatccagtggaacccttcacagaatcccagtctctcaccctgaccgatgtggagaatcttcatcttccattgccactgctccaatcttggatgcaccaaccacatcagccccttcctcccaccgtcatgtttccaccacaatccgtcttgtctctgtcccaaagtaaggtacttcccgttcctcaaaaggctgtaccttatccacagagggatatgccaattcaagcctttttgctgtatcaagaacccgtcttgggaccagttcgcggacccttcccaattatagta

SEQ ID NO: 453 - DNA, 672 bp, synthetic construct
  source 1..672: mol_type = other DNA
atgaaagtcctcatccttgcctgccttgtagctctggctctcgctagagagttggaggagttgaacgtccctggtgaaattgtagagagcttgtcctccagtgaagagagtatcacaagaataaacaagaagatcgaaaaattccaaagtgaagagcagcaacagactgaagatgaattgcaagacaaaattcacccatttgcacaaactcagtctctggtctacccattccctggccctatcccaaacagcctcccacagaatatacctccacttactcaaactcctgtagtagtccccccatttttgcaacctgaagtcatgggcgtgtctaaggtaaaggaggccatggctccaaagcacaaggagatgccatttcccaaatatccagtcgaaccattcacagaaagccaaagtttgaccctcacagatgttgagaatcttcatttgcccctgcctttgcttcaatcctggatgcaccaaccccaccaaccccttccacctacagtgatgttcccaccacaatctgtacttagcctgagccagtcaaaggtcctccccgttccacaaaaagcagtgccctacccccaaagagacatgcctattcaggctttccttctctaccaagaacctgtgctcggacccgtccgtggcccatttcctattatagtt

SEQ ID NO: 454 - DNA, 672 bp, synthetic construct
  source 1..672: mol_type = other DNA
atgaaggtcctgatattggcatgtttggtcgcactcgcacttgctcgtgagcttgaagagttgaacgtacccggagaaatagtggaaagtctttcaagttcagaagaaagcattacacgtattaataagaagatcgaaaagttccaaagtgaggaacagcaacaaaccgaagacgagctccaggataaaatccaccctttcgctcagactcagtccctggtgtaccctttccccggtcccatacctaattccctgccccaaaacattccacccttgacacagacccccgtcgtcgtcccaccattcctccaacctgaagtgatgggcgtttctaaggtgaaggaggcaatggctcccaaacacaaggaaatgccttttcctaagtaccccgtggaacctttcactgagtcccaatccctcacactgaccgatgtggaaaacttgcatctcccactcccccttttgcaaagctggatgcaccaacctcaccagccccttccaccaaccgtcatgtttccacctcagtctgtgctgagcctgtcacagtctaaagttctgcctgtaccacaaaaggctgtgccatatcctcagagagatatgcctatccaggctttcttgctgtaccaagaacccgttttggggccagtgagaggacccttccccatcatagta

SEQ ID NO: 455 - DNA, 672 bp, synthetic construct
  source 1..672: mol_type = other DNA
atgaaggtgttgatccttgcatgtctggtcgcccttgcccttgcacgcgaactggaggaactcaacgtgcctggcgagattgtcgaaagtttgtcctcctctgaagagtccatcaccaggatcaacaagaagatagagaaatttcagtcagaagaacaacaacagactgaggatgagctgcaggacaaaatacatccatttgcacagacacaaagcctggtctacccttttcctggtccaatacctaactctctccctcaaaatatccctcctttgacacaaacacccgtagttgtaccaccattccttcaacccgaagtgatgggcgtcagtaaagtaaaggaggccatggcaccaaagcataaggaaatgccttttccaaaatatcccgtggaaccattcactgagagccagtcattgaccctcaccgacgtggagaaccttcatctcccccttcccctcttgcaaagctggatgcaccagccacatcagcctttgcctcccactgttatgtttcctccccaatccgttttgtccctctcccaaagcaaagttcttccagtaccacagaaggcagtcccatatccacaaagggacatgccaatacaagccttcttgctgtaccaagagcctgtcctgggacctgtcagggggccttttcccatcattgtg

SEQ ID NO: 456 - DNA, 672 bp, synthetic construct
  source 1..672: mol_type = other DNA
atgaaggtactgatactcgcttgtctggtggcccttgcactcgcaagagagttggaggagctcaacgttcccggcgagatagtggagtctctgagcagtagcgaggaaagtattacaagaataaacaagaaaattgaaaaattccaatcagaggagcaacaacaaacagaagacgaattgcaggacaaaatacacccttttgcccaaacacagtccctggtctacccctttccaggccctatacctaattccttgccccagaatatccctccactcactcaaactcccgtggtggttcctcctttcctccagcccgaagtaatgggcgtgtctaaagttaaagaagcaatggccccaaaacataaagaaatgcccttcccaaaatatcccgtcgagccattcactgaatcccagagtcttactcttaccgatgtagagaatcttcacctgcctttgcctttgctccaatcctggatgcaccagccccatcagcccttgccaccaacagtgatgtttcctcctcagtccgttcttagcttgtcccaatcaaaagtccttcccgtaccccaaaaagcagttccctatcctcagagagatatgcctatacaggcattccttctttaccaggaacctgtgctgggaccagtgcgtggccctttcccaataatagtg

SEQ ID NO: 457 - DNA, 672 bp, synthetic construct
  source 1..672: mol_type = other DNA
atgaaggtgcttatcttggcctgtttggttgcacttgctttggcacgcgaacttgaagaattgaatgtacctggtgaaatagtcgagagtctctctagtagtgaggagtcaattacacgcattaacaagaaaatagagaagtttcagtcagaggaacaacagcagacagaagatgagctccaggacaagatacacccatttgcacagacccagtctctcgtttacccattcccaggtccaatacccaactcactgcctcaaaatattccaccacttacacagacaccagtggtcgttccacctttcttgcaacccgaggtcatgggggtttccaaagtcaaggaggccatggctcccaagcataaggaaatgccttttcccaaatacccagtggaaccatttacagaatcacagtcccttacacttactgatgtagagaacttgcatctccctttgcccctgctgcaatcatggatgcatcagccccatcaacccttgccaccaaccgtcatgtttccaccacagtcagtattgtccttgagccaatccaaggttctgccagtccctcaaaaagctgtaccttatccccagcgcgatatgccaattcaagcatttctgctgtatcaagagcctgtactcggtccagtcaggggacctttccccataattgtc

SEQ ID NO: 458 - DNA, 672 bp, synthetic construct
  source 1..672: mol_type = other DNA
atgaaggtgcttatactcgcctgcctcgtcgctcttgcattggctagagaactggaagaacttaacgttcctggggaaatagtggagtcactcagttcatccgaggagtcaataactaggatcaataaaaaaatcgagaagttccagtcagaagagcaacaacagaccgaagatgaactccaggacaaaattcacccattcgcccagacacagtccctcgtctatcctttccctggtccaatacctaattccctgcctcagaatatccccccactgacccagacccccgtggtcgttcctccctttcttcagccagaggtaatgggagtctctaaagtaaaagaggcaatggctcctaaacacaaggaaatgcccttccccaagtaccctgtagaaccttttacagaaagccagagcttgactcttactgacgtcgagaaccttcaccttccccttccattgttgcaatcatggatgcaccagccccaccagcccctgccccccactgtgatgtttcctccccagagtgttctttcattgagccagtccaaagtgctccccgtcccccaaaaggcagtgccttaccctcagagggatatgcccattcaggctttcctcctgtatcaggagcctgtacttggacccgtaagggggccatttcctattatagtt

SEQ ID NO: 459 - DNA, 672 bp, synthetic construct
  source 1..672: mol_type = other DNA
atgaaagtgctcatactggcatgcttggtcgctctggcactggcccgcgagctggaggaacttaatgttcccggagagattgtcgaatcactttccagcagtgaggagtccatcacccgtataaacaagaaaatagaaaagttccaatctgaggaacagcaacagacagaggacgaacttcaggacaagattcatccattcgcccaaactcaatcacttgtatatccattcccagggcccatcccaaactcattgccccagaacataccacccctgacccagactcctgttgttgttcctccattcctccagccagaggtgatgggggtgtccaaggtcaaagaggctatggctccaaaacacaaagagatgcctttcccaaagtaccctgttgagcctttcacagagagtcagagtctgacactcactgatgtagagaatcttcatctgccacttccactccttcagagttggatgcaccaacctcatcagcctcttccccccactgtcatgttcccaccccagtcagtattgagtttgagtcaatctaaagtgcttcctgtcccacagaaggcagttccctacccacagagagatatgcccattcaggcattcctgctgtaccaggagcccgtgttgggacctgtaagaggaccatttcctattattgtc

SEQ ID NO: 460 - DNA, 672 bp, synthetic construct
  source 1..672: mol_type = other DNA
atgaaagtcttgatcctggcctgcttggtcgctctcgccttggcaagagagcttgaggaattgaatgtcccaggagagatcgtcgaaagcctgagcagctccgaggaatctattacccgcataaataagaagatcgaaaagtttcagagtgaggaacaacaacaaacagaagatgaactgcaggataagatccaccctttcgcacagacacaaagtttggtatatccctttccagggcccatccctaacagtcttccccagaacattcctcccctgactcagactccagtggtcgtgcctcctttcctccaaccagaagtcatgggcgtgtcaaaagtgaaggaagcaatggcaccaaaacacaaggaaatgccatttccaaaataccccgtcgaacctttcaccgagtcccaaagcctgactcttactgacgtagaaaacctgcatctgcccctcccactgctccagtcatggatgcaccagccccaccagcccctgccacccacagtaatgtttccaccacaatcagttctcagtctttcccagtcaaaagttctgcccgtgccccagaaggcagtcccatatccacaaagagacatgcccatacaagcattcttgctttaccaagaacccgtccttggccctgtacgtgggcccttccccattatagtc

SEQ ID NO: 461 - DNA, 672 bp, synthetic construct
  source 1..672: mol_type = other DNA
atgaaggtgttgattctggcttgcctcgttgccctcgccttggcccgcgaattggaggaacttaacgtaccaggagagattgtagagtccctcagcagcagtgaggaatccatcacaaggataaacaaaaaaatcgagaaattccagagcgaagaacaacagcaaacagaagacgaactgcaggataagattcaccccttcgctcagacacaaagcctggtctacccatttcctggaccaatcccaaacagtttgccacaaaatatccctcctctcactcagacaccagtcgtggtaccacctttcctgcaacccgaagttatgggtgtgtcaaaagtaaaagaagctatggcacccaagcataaagagatgccattccccaagtaccctgttgagccttttacagagagtcagagcctgactctcaccgatgtagaaaacttgcatctccctcttcccctgcttcagtcttggatgcatcagccccaccaaccactgcccccaacagtgatgttcccaccccagagcgtattgagtctcagccaaagcaaggttctgcccgtgccacagaaagctgttccctatccacagcgtgacatgccaattcaggcttttttgctctaccaggaacccgtcctgggacctgttagaggcccttttcccattattgtg

SEQ ID NO: 462 - DNA, 672 bp, synthetic construct
  source 1..672: mol_type = other DNA
atgaaggttttgattctcgcttgcttggtcgcactggcccttgcaagagagttggaagagttgaatgtcccaggcgagattgtcgaatcacttagcagcagcgaagagagtattacacgtataaacaagaagatagaaaagtttcaatcagaggaacaacagcaaactgaggacgagttgcaggataaaattcaccccttcgcccaaacccagtccctggtctacccattccctggtccaatccccaacagtttgcctcaaaacatccctcctcttacacaaactccagttgttgtacctccttttcttcaacccgaagttatgggtgtatctaaggttaaggaggccatggctcccaaacataaggaaatgccctttcctaaataccctgtcgagccttttacagaaagtcaaagccttaccctgacagacgtagagaacttgcatttgccactgcctttgctgcaaagctggatgcatcaaccacatcaacctcttcctcccacagtaatgttccctccccagtccgtcctgtctctttcccagagtaaggtcctccccgtaccacaaaaggcagtcccatacccacagagggatatgccaattcaggcttttctgctctatcaggaaccagttcttggccccgtgcgcggacccttcccaatcatcgtg

SEQ ID NO: 463 - DNA, 672 bp, synthetic construct
  source 1..672: mol_type = other DNA
atgaaggtccttatattggcatgccttgtggctcttgcattggctagggagttggaggaactgaacgtcccaggtgagattgtggaaagtcttagcagttctgaggagtctataactaggattaacaaaaagattgagaaatttcaaagtgaggagcagcaacagaccgaggatgagttgcaagataagatccatccttttgcacagacacaaagccttgtgtatccttttccaggacccatccccaactcacttccccaaaatatccctcctcttactcaaactcctgtggtggttcctcctttcctccagcctgaggtcatgggagtcagtaaggtaaaggaggctatggctccaaagcataaggaaatgccatttcccaagtatcccgtcgagccatttacagagtcacagagcctcactctcactgacgtggaaaatctgcatctgcctcttcccctccttcaatcctggatgcaccagccacatcaacctctgccccccacagtcatgtttcctccccaatccgtattgtctttgtctcagagtaaggtattgcccgtccctcagaaggctgtgccctacccccaaagagatatgcctatccaagcattcctgctttatcaagagcctgttcttggtcccgtccgcgggccattccctattatcgta

SEQ ID NO: 464 - DNA, 672 bp, synthetic construct
  source 1..672: mol_type = other DNA
atgaaagttcttattttggcctgtcttgtagctctggcactcgcaagagagctggaagagttgaatgttccaggtgagatagtagagagtctgagttctagcgaagagagcatcacccgtatcaataaaaaaattgagaagtttcagtctgaagaacagcagcagactgaggacgagttgcaggacaaaattcatcctttcgcacaaacccaatctcttgtctatcctttccctggacccatcccaaattccttgccacaaaacattcctcccctgacccagaccccagtcgtggtcccccctttcctccagcccgaagtgatgggagtctcaaaagtcaaagaggctatggctcccaaacataaggagatgccctttcctaagtaccccgtggagccatttacagagagccagagcttgactcttacagatgtcgaaaatcttcatctgcctctcccacttctccagtcttggatgcatcagcctcatcaacctctgccccctactgtcatgttccctccacagtctgtattgtccctttctcaatcaaaggtcctgcctgtcccccagaaagcagtcccatatcctcagagagatatgccaattcaggctttcttgttgtaccaagaacctgtacttgggcctgtccgtggaccattccccatcatcgtg

SEQ ID NO: 465 - DNA, 672 bp, synthetic construct
  source 1..672: mol_type = other DNA
atgaaagttcttattctcgcttgcttggtagctttggcccttgctcgtgagttggaagaacttaatgttcctggcgagattgtagagtccctctcaagctctgaagaaagcataactcgtataaacaaaaagattgagaaattccagtccgaggagcagcagcagaccgaggatgaacttcaggataaaatacatccctttgcccagactcagagcttggtatatccatttcctggacccattccaaactcactgccccaaaatatcccaccactgacacaaactcccgtagttgtacctccatttctgcagcccgaggtgatgggtgtttccaaggttaaagaggccatggcacccaagcataaagaaatgcccttcccaaagtacccagtagaacctttcactgaaagtcaatccctgacacttactgatgttgagaacctccatcttcctcttcctctcctgcagagctggatgcatcaacctcaccagcctttgcctcctacagtcatgtttcctccccagtcagtcctgtcactctctcagtctaaagtgctccctgtcccccaaaaggctgttccatacccacagagggatatgcccatccaagcattcctgctttatcaggagcctgtattgggtcctgttagagggccattccctatcatcgtt

SEQ ID NO: 466 - DNA, 672 bp, synthetic construct
  source 1..672: mol_type = other DNA
atgaaagtgcttatcctcgcttgcctggtcgccctggcattggctcgtgagttggaggagctgaacgtcccaggagaaatcgtcgagtctttgagctcttccgaagagtctatcacacgtataaacaaaaagattgaaaaatttcagagcgaggagcagcaacagacagaagacgagcttcaggacaagatacatcccttcgctcaaacacaatcactggtatatcctttccctggtcccatacctaatagtcttccacaaaatatacccccccttacacaaacccctgtcgtggttcctccattcttgcaaccagaggttatgggagtgtccaaagtcaaggaagcaatggcaccaaaacacaaagaaatgccatttcccaagtatcccgtagagccttttactgaatctcagtctctcacacttactgatgtggagaaccttcatcttccccttcccctccttcagtcatggatgcatcagccacaccaaccactgccccctaccgttatgttccctccccaaagtgtcctcagcctcagtcagtccaaagttctccccgtccctcagaaggccgttccctaccctcaacgtgacatgcccatccaagcctttctgctgtaccaagaacctgtccttgggccagttagaggacctttccctatcattgtg

SEQ ID NO: 467 - DNA, 672 bp, synthetic construct
  source 1..672: mol_type = other DNA
atgaaagttctgatactggcctgtctggtagcactcgccctcgcccgtgaactggaggagttgaacgtgccaggagaaattgtggagagtctttctagttccgaggaatcaattacccgcatcaacaaaaaaatcgagaaatttcaatctgaggagcagcagcagactgaagacgagttgcaggacaagattcacccatttgcacaaacacaatctcttgtttatcccttcccagggcctattcccaatagtctgccacaaaacataccacctctgacacaaactcctgtggtggttcctcccttccttcagcccgaggtcatgggggtatctaaagtaaaggaagccatggcaccaaagcataaggagatgccttttcccaaataccccgtggagccattcacagagagccagagtcttacccttactgacgtggagaaccttcatttgcccctccctcttctccagagctggatgcaccagcctcaccagccactccctcctactgtcatgttcccccctcaatcagttctgtcattgtcccagtccaaagttctcccagtgcctcagaaagcagtgccttatccccaaagagatatgccaatacaagcatttttgctgtaccaggaacccgttcttgggcctgttcgtggacccttccctataattgtg

SEQ ID NO: 468 - DNA, 672 bp, synthetic construct
  source 1..672: mol_type = other DNA
atgaaagtgctcatactcgcatgcctcgtcgcattggctcttgccagggaacttgaggaactgaacgtccctggggaaatcgtcgagtcactttctagcagcgaggagtcaattacacgtataaacaaaaagatcgagaaattccaatccgaggaacagcagcagacagaagatgagctgcaagacaaaattcatccatttgctcaaacccaatctctcgtgtatcctttccctggccctattcccaattcactcccccaaaatattcctccccttacacagacacccgttgtcgttccccctttccttcaaccagaggtcatgggagtcagtaaagtcaaagaggctatggcaccaaagcataaggaaatgcctttccccaaatacccagtagaacctttcaccgaaagtcagagtcttactctgactgacgtggagaatctgcatttgccactccccctcctccaaagttggatgcaccagccccaccagccattgccccccacagttatgttccccccacaatccgttttgagcttgtcccagagcaaagttttgccagtgcctcagaaagccgtcccttatccacaaagggatatgcctatccaagccttcctgctgtatcaagaacccgtgcttgggcctgttcgcggaccatttcccatcatagtc

SEQ ID NO: 469 - DNA, 672 bp, synthetic construct
  source 1..672: mol_type = other DNA
atgaaagtactgattttggcttgtctcgtagcactggctctggctcgtgaactggaggaactgaatgttcccggcgagatcgtagagtccctttcttcctctgaggaatcaatcacccgtataaacaagaaaatagagaagttccagagcgaagaacagcagcaaacagaggacgaactccaggataaaattcacccatttgcccaaactcaaagtctggtttatccattccctggaccaatccctaacagtttgccccaaaacatacctccattgactcaaaccccagtagttgtacctccatttcttcagcccgaagtgatgggagtatccaaggtcaaagaagcaatggctcccaagcacaaggaaatgccatttccaaagtatcccgtcgagccatttactgaaagccaaagccttactcttaccgacgtggaaaacttgcatttgcccctcccactgctccaatcatggatgcaccagccccaccaaccactgccccccacagttatgtttcctccccagtcagtcttgagcttgtcccaatctaaagtacttccagtgccacagaaagctgtaccttatcctcaaagggatatgcctatacaggcttttttgttgtaccaagaacccgttctgggacctgtgcgcgggccatttccaatcatcgta

SEQ ID NO: 470 - DNA, 672 bp, synthetic construct
  source 1..672: mol_type = other DNA
atgaaagttcttatcctggcctgcctcgtcgcacttgcccttgcccgcgaactcgaggaattgaacgttcctggagaaatcgtcgagtcactctcttcaagcgaagaatccataacaagaataaataaaaagatcgaaaaatttcagagtgaagagcagcaacagactgaggacgaattgcaagataagattcatcctttcgcccagacacaatccctggtgtatcccttccccggccccatccctaactctctgccacagaacattcctccactcacccaaacccccgtggtggtacctccattcctccaaccagaggttatgggggtatctaaagtgaaggaggctatggcccctaaacacaaggagatgcccttccccaaatacccagtcgaaccctttactgagagtcagagtctgacactcaccgatgttgagaatttgcatctgccactccctttgctccaatcatggatgcaccaaccacaccaacctctcccccctaccgtgatgttccctcctcaatctgttctttccttgtcccaatccaaagttcttcctgtgccccagaaggccgtgccttaccctcagcgtgatatgccaattcaagccttcctgttgtaccaagaacctgtgttggggcctgtacgcgggccttttccaatcatcgtt

SEQ ID NO: 471 - DNA, 672 bp, synthetic construct
  source 1..672: mol_type = other DNA
atgaaggttttgattctggcttgccttgttgccctggcccttgcccgcgaactggaagagctgaacgttcctggtgagattgtggaatccctgtcatcctctgaggaaagcattactagaattaacaaaaaaatagagaagttccaaagcgaagaacagcagcagactgaagatgagcttcaggacaaaatacatccatttgcccaaacccagtccctggtgtaccctttcccaggacccatacctaattcacttccacagaacatcccacccctgactcagacaccagttgttgtcccaccttttctccagcccgaggtcatgggagtgtcaaaagtaaaggaagcaatggcacccaaacacaaagaaatgccctttccaaagtaccctgttgagcccttcacagagagtcagtcacttaccttgaccgatgtggaaaacctgcatctgcccctcccacttttgcagagctggatgcaccagccacatcagcctctccctcctaccgtaatgtttcctccacagagtgtactttcactgtcacagtccaaagtgttgcctgtcccacagaaagcagtaccctacccacagcgcgacatgcccatacaagcattcctcctctaccaagagcccgtcctggggccagtacgcggcccattccctatcatagta

SEQ ID NO: 472 - DNA, 672 bp, synthetic construct
  source 1..672: mol_type = other DNA
atgaaggttcttatcttggcctgcctcgtcgctttggctttggctagggaactcgaagagctgaacgtccctggggagatcgtggagtctttgtcatcatccgaggagagcataacaaggatcaataagaagatcgaaaagttccaatccgaagaacaacagcaaacagaggatgaactccaggacaaaatccatccttttgcccagacccagtcccttgtttaccccttccctggcccaatccccaattcactgcctcaaaatattccccccctgacacagactcctgtggtcgtgccaccatttctccagcctgaggtgatgggggtcagcaaagtcaaagaagctatggcaccaaagcacaaagagatgcctttccccaagtaccccgtggagcccttcactgaatctcaatcacttaccctgactgatgttgaaaatctgcatcttccacttcctcttctccagagttggatgcatcagcctcatcaacctctgcccccaaccgtgatgtttcctccacaaagcgtgcttagtctgtcccaaagcaaagtgttgcccgtccctcaaaaggctgtaccttatccacagagagatatgcctatacaggcttttttgctttaccaggagccagtccttggccccgtaagaggccccttccctattattgtg

SEQ ID NO: 473 - DNA, 672 bp, synthetic construct
  source 1..672: mol_type = other DNA
atgaaagtgctcatccttgcatgtctcgtcgccttggctcttgcccgtgagttggaggagctgaatgtacccggagaaatagtggagtcactcagcagctcagaggaatccattacaaggatcaacaagaagatagagaagttccaaagcgaagagcaacaacaaacagaagacgagttgcaagataaaattcacccttttgcccaaacacaaagtcttgtctatcctttcccaggacctatacctaatagtcttcctcagaacataccacctctgacacagaccccagtagtggtgccaccattcttgcagcccgaggtcatgggggtaagcaaagtcaaggaggcaatggctcctaaacataaagagatgccatttcctaagtaccccgtggaaccttttaccgaatcccagagcttgacactgaccgatgtcgagaatcttcatctcccactgcctctccttcagagttggatgcaccaaccacaccagccattgccacctacagtgatgtttcctccccaatccgtactgtcactttcccagagtaaggtgctcccagtgcctcaaaaagccgtgccctatccccagcgcgacatgcctattcaggccttcttgttgtatcaagagcccgtcttgggacctgtgcgcgggcccttccccattatagtt

SEQ ID NO: 474 - DNA, 672 bp, synthetic construct
  source 1..672: mol_type = other DNA
atgaaggtcctgatactcgcttgcctggtggccctcgcactcgcaagagaactggaagagttgaatgtcccaggggagatcgtggagagcctctcttcttcagaagagtccattacccgcataaataaaaagatagaaaaatttcaatccgaggagcagcaacaaacagaagatgaacttcaggacaaaattcaccccttcgctcaaacccagtctcttgtttatcctttcccagggccaattccaaattcactgccccagaatataccccctctcactcagacccccgttgtcgtgccccccttcctgcaacccgaggtcatgggagtgagtaaagtgaaagaggcaatggcccctaaacataaagaaatgccatttcctaagtatcctgtagaacccttcaccgagagccagtcacttactcttactgatgttgaaaatttgcatctccccttgccattgctccaatcatggatgcaccagccacatcagccactccccccaaccgttatgtttccaccccagtctgtcctgtctttgagccagtcaaaagttttgccagtgcctcagaaagcagtaccttacccacagagagacatgccaatacaagccttcctcctgtaccaggagccagtgcttggtcctgtaagaggtccatttcctatcatcgtt

SEQ ID NO: 475 - DNA, 672 bp, synthetic construct
  source 1..672: mol_type = other DNA
atgaaagtgttgatcttggcctgcctggtagcactggctttggctcgtgagctggaggaattgaacgtacctggtgaaattgtagaatcactctcttcttcagaagaatcaatcacaaggatcaacaaaaaaatagagaaattccaatcagaagagcagcaacagacagaggatgaactgcaagacaaaatccatcctttcgcccaaacccaatccctcgtctacccatttcctggcccaatccctaactctcttcctcaaaacatcccaccattgactcaaaccccagttgttgtcccaccctttttgcaacccgaggtaatgggcgtttcaaaagtcaaagaagctatggcaccaaagcataaagaaatgccttttcctaagtaccctgtggaaccatttaccgagagtcaatctcttactctcactgacgttgaaaacctgcatctgcctctgccattgttgcagtcttggatgcaccagccccaccagcccctgcccccaaccgtaatgttccctccacaatcagtattgagtctttcacaatcaaaagtactccccgttccccagaaagctgttccttatccacagcgtgacatgcctatccaggctttcttgctctatcaagaacctgtcctgggaccagtgaggggaccctttcccataatcgtt

SEQ ID NO: 476 - DNA, 672 bp, synthetic construct
  source 1..672: mol_type = other DNA
atgaaagtattgattcttgcttgcctggtggctttggcactggctagagagcttgaagagttgaacgtacctggggagattgtggaaagtctcagtagctctgaggagtccattaccaggataaacaaaaagatcgaaaaatttcaatccgaagagcaacagcaaacagaggacgaactccaggacaaaattcacccatttgcacaaacacagagtcttgtctatcccttccccggcccaatacctaatagtctccctcaaaatataccccctctgacccaaacacctgtagtggtgcccccctttctccagcctgaagtgatgggcgtgagtaaagttaaagaggccatggccccaaaacataaggagatgccattccccaaatatcccgtagagccattcaccgaatcacagagtttgaccctcaccgacgtggaaaacctgcatctcccacttcctctgctccagagctggatgcatcagccacaccagccacttccacctactgtgatgttccctcctcagtccgttctgtcattgagccagtccaaggtgctcccagtccctcagaaagctgttccatacccacaaagggatatgccaatccaggcttttctgctttaccaagaacccgtactgggaccagtacgcggacctttcccaattattgtg

SEQ ID NO: 477 - DNA, 672 bp, synthetic construct
  source 1..672: mol_type = other DNA
atgaaagtgcttatactcgcatgtcttgtcgccctggccttggccagagagcttgaagaactcaacgtcccaggtgagatagtcgaatccctgtcttcaagcgaggagtcaataaccagaataaataaaaaaatcgaaaaatttcaatccgaggaacaacagcaaactgaagacgagttgcaggacaagatacaccccttcgcccagactcagagtttggtgtatccatttcctggacccatcccaaattccctcccccaaaacatcccaccactcactcaaacacctgttgtagtacccccctttctccaacccgaagtcatgggcgtatctaaggtcaaagaggcaatggcacctaagcacaaagaaatgccatttccaaagtaccccgtggaaccttttactgaaagtcagagtttgactttgactgatgtggagaacctccaccttcctttgccactgcttcagagttggatgcaccagccacaccagccactgcctccaacagtgatgtttcccccccaatccgtcctgagtctgtcacagagtaaagtcctgcccgttcctcaaaaagctgtaccttacccacaacgtgacatgccaatccaggcttttcttttgtaccaggagcctgtcctggggccagtacgcgggcccttccctataattgtg

SEQ ID NO: 478 - DNA, 672 bp, synthetic construct
  source 1..672: mol_type = other DNA
atgaaggttctgatccttgcctgcctcgtagctcttgcactggctagggaattggaagaactcaacgtacccggagagattgtggaaagcctgagctcaagcgaggagagcataactcgcataaacaagaagattgagaagtttcaaagtgaggaacagcaacaaaccgaagatgagctccaggataaaatacatcctttcgcacaaacacaaagtttggtttaccccttcccagggcctatccctaactcattgccccaaaacataccccctctgacccaaacccctgtagtcgttccccccttcctccagccagaggtaatgggcgtttctaaagtgaaggaagccatggcacctaagcacaaggagatgccattccccaaatatccagtagagccattcacagagtcccaaagcctcaccctgactgatgtcgaaaatctccatcttcccctccctctcctgcagtcatggatgcaccaaccccatcaacctcttccaccaaccgtcatgtttccaccccaaagcgtattgagcttgtcacaaagcaaggtcttgccagtcccccagaaggcagtaccttatcctcagagagatatgcccatacaggctttcttgctttaccaagaacccgtacttggaccagttcgcgggccattcccaataatcgtt

SEQ ID NO: 479 - DNA, 672 bp, synthetic construct
  source 1..672: mol_type = other DNA
atgaaagtcctgatacttgcatgtcttgtggccctcgctctcgccagggaactcgaagaacttaacgttcccggcgagatagtagaatctctttctagcagcgaagagtctataactagaatcaataagaagattgagaagtttcagagtgaggagcagcagcagaccgaggacgaacttcaagacaaaatacatcccttcgcacagactcaatcattggtttacccatttcccggcccaattccaaacagtttgccccaaaacattcctccacttacacaaacccccgtagttgtacctcctttcctccagccagaagttatgggagtatccaaagttaaagaggcaatggccccaaaacacaaagaaatgccattccccaagtatcccgtagaaccttttacagaaagccaatctcttacactgacagatgtggagaatctgcatcttcctctgccattgctccaaagttggatgcaccagccccatcaacctttgccccccactgtcatgttccccccacaaagtgttctttctctgagccagagcaaggtccttccagtcccacaaaaagccgtaccatacccacagagggatatgcccattcaggcatttctcctgtatcaagaacctgtccttggtccagtcagagggccatttcccattattgtt

SEQ ID NO: 480 - DNA, 672 bp, synthetic construct
  source 1..672: mol_type = other DNA
atgaaagtacttatcttggcctgtttggtcgcactcgcacttgcaagagagctcgaagaattgaatgtccctggcgaaatagttgaatctttgtcatcatctgaggaatcaatcactagaataaacaagaaaatagagaagtttcagtctgaagagcagcagcaaaccgaagacgagttgcaggacaagattcatccttttgcacagactcagtccctcgtatatccattccctggacccataccaaattctctcccccagaacatcccccctttgacccagacacctgtcgtagtgcccccattcctccaacctgaggtaatgggtgtaagcaaggtcaaagaagctatggctccaaagcataaagaaatgccttttcccaagtatcctgtagagccatttactgaatctcagagcctcactcttacagacgttgagaacctgcatctccccctcccacttttgcagagttggatgcaccaaccccatcaacccctgccccctaccgtgatgtttcctccccaatcagttttgagtcttagtcagagtaaagtgttgccagtgcctcaaaaggctgtcccttatcctcagagggacatgcctatacaagccttcctcctttaccaggagcccgtgcttggacctgtgcgcggccccttcccaattattgtc

SEQ ID NO: 481 - DNA, 672 bp, synthetic construct
  source 1..672: mol_type = other DNA
atgaaggtcctcattctggcttgtctcgttgctctcgcactcgcacgcgaactggaggaactgaacgtgccaggcgaaattgttgaaagtctttctagttctgaggagagcattactaggataaacaaaaagattgagaagttccagtcagaggagcaacaacaaactgaggatgaacttcaggataaaatacatccttttgcacagacccagtcactggtttatccttttcctggtccaattccaaattcactgccacagaacatcccacctctcacccaaacccccgtggtagttcctcccttcctccaacctgaagtaatgggcgtgtcaaaggtaaaggaggctatggcacctaaacataaggagatgccatttcctaaatatccagtagaaccttttaccgaaagccagagcttgacactcaccgatgttgagaacctccatctcccactgcccctcctgcaaagctggatgcatcaacctcaccaaccacttcctcccacagtcatgtttccaccacaaagtgtcctctcattgtcacagagtaaagtactgcctgtgcctcaaaaagccgtaccctatccacagcgtgacatgccaattcaggcatttttgctctatcaagaacccgtgctgggtccagtcaggggtcctttccccataatcgtg

SEQ ID NO: 482 - DNA, 672 bp, synthetic construct
  source 1..672: mol_type = other DNA
atgaaggtacttatactggcttgtctcgtggctctggcactcgctagggagctggaggagctgaatgttcccggagagatcgtggagtctctctcttcctccgaagaatctataacccgtatcaacaaaaagattgagaagtttcagagtgaggagcaacagcaaactgaagatgaacttcaagacaagatccacccctttgctcagactcaaagccttgtatatcctttccccggccctatccccaactcacttccccaaaacattcctcctctgacacaaactccagttgtagtgcctccctttctgcaaccagaagtcatgggcgtttcaaaggtcaaagaggcaatggctccaaagcacaaagagatgccttttcctaaataccccgttgagccatttacagaatctcaaagtcttactctgaccgacgtcgagaatctccacctgcctcttccattgttgcaatcatggatgcatcagccccaccagcctttgccccctacagtaatgtttccaccacagagcgtccttagcttgagtcagtctaaagtcctgccagttcctcaaaaagccgtaccatatcctcaaagagacatgcccattcaagccttccttctctatcaagaaccagtgttggggccagttcgcgggccttttcctataattgtg

SEQ ID NO: 483 - DNA, 672 bp, synthetic construct
  source 1..672: mol_type = other DNA
atgaaggtactcatccttgcctgcctcgttgctttggcattggctcgtgaacttgaggagcttaacgtccccggtgaaattgttgagtctctgagttcctctgaggagagtataactaggataaataagaagatcgaaaagttccaatcagaagaacaacaacagactgaggacgaacttcaagacaagatccatccattcgctcagacacagtcacttgtttaccccttccctggccctatacctaactcactgccacaaaatatccctcccctgacacagactcctgttgtggttccccctttcctgcagccagaggtgatgggggtttccaaagttaaagaagccatggcccccaaacataaagagatgcccttccccaagtatccagtcgaacctttcactgaatcacagagcctgacactgactgatgtagaaaacctccacttgccccttccattgttgcaatcttggatgcaccaacctcatcaaccacttccaccaaccgttatgtttcctccccaatccgtcttgtccctctctcaaagtaaagtcttgcccgtccctcaaaaagccgtcccttacccacagagagacatgccaatccaggcattcctcctttaccaagagccagtcctgggcccagtaaggggtccatttccaattattgta

SEQ ID NO: 484 - DNA, 672 bp, synthetic construct
  source 1..672: mol_type = other DNA
atgaaagtcttgatccttgcctgcctcgttgccctcgccttggcacgcgagcttgaggaactgaatgtacctggagaaattgttgagtcactcagttcttccgaagagagcatcacccgtataaataagaaaatcgagaagtttcaaagcgaggaacagcaacaaacagaggatgaattgcaagacaaaattcatccttttgctcaaacacagtctcttgtttatcccttccctggccctattcccaatagcctcccacagaacatcccacccctcacacagacacctgtggtagtgccaccatttctgcagcctgaggtaatgggagtgagtaaagtcaaggaagctatggcacccaaacataaagagatgccatttcccaaataccccgtggaaccctttaccgagtctcaaagcctgaccctgaccgatgtcgagaatttgcatcttcccctgcccttgcttcagtcatggatgcaccagcctcatcaacctctccctccaactgtgatgtttcccccccaatccgtactctctctctctcagtcaaaggtgctccctgttcctcagaaagccgttccttatccacagcgtgatatgccaatacaagccttcttgctttatcaagagcctgtcctgggtccagtgagagggccctttccaattattgtg

SEQ ID NO: 485 - DNA, 672 bp, synthetic construct
  source 1..672: mol_type = other DNA
atgaaagtcctcattctcgcctgcctcgttgcccttgccttggcccgtgagctggaagagttgaatgttcccggcgaaatcgttgagagcttgagcagtagtgaggaaagtatcacccgcataaacaaaaagattgagaaattccaatccgaggaacagcaacagaccgaggacgaactgcaagacaaaatccaccccttcgctcagacccagtctctggtgtaccctttcccaggccccatccccaactccttgcctcaaaacatacccccactgacacaaacacctgttgttgtccctcctttccttcagccagaggttatgggtgtctcaaaggtgaaggaagctatggcacctaaacacaaagaaatgccatttccaaaatacccagttgaaccctttacagaaagtcaaagcctgactctcactgatgtcgaaaaccttcacttgccactccctcttctccaatcttggatgcatcagccacaccagccactgcctcctacagttatgtttccacctcaatctgtacttagcctgtcccaaagcaaggtactcccagtaccacaaaaagccgttccatatccacagagggacatgcctatccaggcattccttctttaccaggagccagttctgggacccgtgcgtggtcccttccctattatcgtt

SEQ ID NO: 486 - DNA, 672 bp, synthetic construct
  source 1..672: mol_type = other DNA
atgaaggtgctgattttggcttgccttgttgctctggctctcgcaagggaactggaggagctgaacgtgccaggagaaatagtggagagcttgtccagctccgaggaatccatcaccagaataaataaaaagatagagaaattccagtctgaggaacagcaacaaaccgaggacgagttgcaggacaaaattcaccccttcgcacagactcagtcccttgtctacccatttcctgggcctatccctaactccctgcctcagaacatccccccactgacccaaacacctgtcgtcgtccctccttttctccagcctgaagttatgggtgtcagtaaagtaaaggaggctatggctccaaagcataaagaaatgccatttcccaaatatccagttgaaccattcactgaatcccagtcattgactttgacagacgttgagaacttgcaccttcctttgcctttgcttcaatcttggatgcatcagcctcatcagccattgcctcctactgtcatgtttccccctcaaagtgtgttgagtctctcacaatctaaagtgctccctgttccacagaaggccgttccttacccccaacgtgatatgcccatccaggcctttctgttgtatcaagaacccgtcctgggacccgttagaggtccattcccaattatcgtg

SEQ ID NO: 487 - DNA, 672 bp, synthetic construct
  source 1..672: mol_type = other DNA
atgaaagtgttgatactggcctgtctcgtagctttggcactcgcacgtgaacttgaggagttgaatgtgcctggagagatcgtggagtctcttagtagtagtgaggagagtatcactagaattaataaaaagatagagaaattccagtccgaggagcaacaacagacagaagatgaactgcaagacaagatccacccattcgcccagacacaaagtcttgtctatcccttccctggaccaatacccaattcccttcctcaaaacattcctcccttgactcaaaccccagtggttgtgcctccttttctccaaccagaagtaatgggggtcagcaaagttaaagaggcaatggcaccaaaacataaggagatgccattcccaaaataccccgtcgagcccttcacagagtcacagtctctgactctcaccgatgtggaaaatctccatttgcctctgcccttgcttcagagttggatgcaccagcctcaccagcctttgccccctacagtgatgtttccaccacagagtgtgctttcattgtcacagtccaaggtcctccccgtcccccaaaaagctgtaccataccctcagcgcgatatgccaattcaagcctttctgttgtatcaggaacccgtcctcggccctgttcgtggcccattcccaattattgta

SEQ ID NO: 488 - DNA, 672 bp, synthetic construct
  source 1..672: mol_type = other DNA
atgaaggttctgatactggcctgtcttgtagctctggcacttgcacgcgaattggaggagctgaatgtacctggggagatagttgaatccctgtcatcttccgaggagtcaatcacacgcatcaacaaaaagatcgagaagtttcagagtgaggagcagcaacagacagaagacgagctgcaagacaaaatacatcccttcgctcaaacccagagcctcgtatatccttttccaggccccatccccaatagcctgcctcaaaacatacctccattgacacagacccccgttgtagtgccaccatttctgcaacctgaggtaatgggtgtctcaaaagtgaaagaagcaatggctcccaaacacaaagaaatgccatttcctaaatatcctgtagaaccatttacagaaagccagagtcttacattgacagatgtagagaacctccatttgccacttcctctccttcaatcttggatgcaccaaccccaccaaccactgcctcctactgttatgtttcctccacaatctgtcctctccctgtcacagtccaaagtcctgcctgtacctcaaaaggcagtgccctacccacagagggacatgccaatacaagcattccttctgtaccaagagcccgtgcttgggccagtccgtggccctttcccaatcattgtt

SEQ ID NO: 489 - DNA, 672 bp, synthetic construct
  source 1..672: mol_type = other DNA
atgaaagttcttatactggcctgtctggtggccctggcattggctagagagctggaagaactcaacgtgcccggcgagattgtagagtccctctcctcaagcgaagagagtatcactcgtatcaacaagaagatcgagaagttccaaagcgaagaacaacagcagactgaagatgaactgcaggacaaaatccacccatttgcacagacacaatctctggtctaccccttccccggccctatccctaacagtcttcctcaaaacatacctccactcactcaaactccagtggtcgtccctcctttcctgcagccagaagtcatgggcgtttccaaggtgaaggaagctatggctccaaaacacaaagagatgcctttccccaaatacccagtcgaacctttcaccgagtcccagtctctgacactgactgacgtagagaatcttcacctgccccttcctctgcttcagtcttggatgcaccaaccccaccaacccttgcctcccacagtcatgttccccccacaaagcgtcctgagccttagtcagagcaaagtcttgcctgtgccacaaaaagctgtaccttatccacaacgcgatatgcccattcaggctttccttttgtatcaggaacccgtgcttggccctgtcagaggaccatttcctataatcgtt

SEQ ID NO: 490 - DNA, 672 bp, synthetic construct
  source 1..672: mol_type = other DNA
atgaaggtccttatactcgcttgtttggtcgcacttgcactggccagagaactcgaagaactcaatgttccaggagaaattgtagaatctctctcaagctctgaagagagcatcacccgcataaataagaagattgagaagttccagtctgaagaacagcaacagacagaagatgaattgcaagataagattcacccttttgcacagactcaaagtctggtgtatccattccccggaccaattcctaattcacttccccagaacattccccctctcactcaaacaccagttgtcgtgcctccattcttgcagcccgaagttatgggggtgtccaaggttaaagaagctatggcccctaagcataaagaaatgcccttcccaaagtatcctgtggaaccattcactgaaagccaatccctcacactcacagacgtggagaatctccatttgcccttgccacttctgcagtcctggatgcatcagccccatcagcctttgccccctacagtaatgtttccaccacagagtgttctctccctgtctcagtcaaaagttcttcccgtgcctcaaaaagctgtgccttacccccagcgcgacatgcctattcaagcatttctgctgtaccaggaacccgtacttggacccgttaggggtcccttcccaatcattgtg

SEQ ID NO: 491 - DNA, 672 bp, synthetic construct
  source 1..672: mol_type = other DNA
atgaaggtacttattttggcctgcctcgtagctctggcattggctagggaattggaggaacttaatgttccaggagaaatagtggaatcactctcttcctccgaggagtctataacaaggattaacaaaaaaatagagaagtttcaatcagaagaacagcaacaaactgaagatgagctgcaggacaagatccatccctttgctcaaacccaatccctggtctacccatttcctggcccaattccaaattctctgccacaaaatattccccctctcacccagacaccagtggttgtccctcctttcctgcaacctgaggttatgggtgtatccaaggtcaaggaggcaatggctccaaaacacaaagaaatgccattccccaagtatccagttgaaccattcacagaatcccagtctttgacacttaccgatgtggaaaacttgcaccttcctttgcccctgttgcaaagctggatgcatcaaccccatcagcccttgccacctactgttatgtttcctcctcaatccgtactgagcttgagtcaatccaaagttctcccagtccctcaaaaggctgttccctatccacaaagagatatgcccatacaagcctttctgttgtatcaggaacctgttctcggcccagtaagaggaccctttcccataatagta

SEQ ID NO: 492 - DNA, 672 bp, synthetic construct
  source 1..672: mol_type = other DNA
atgaaagtcctgattctcgcctgcctcgttgcccttgcactggcccgtgagcttgaagaactcaatgtgcctggggaaatagtagaatctctcagctcttcagaggagagcattactcgtataaataaaaaaatcgagaaatttcaatcagaggaacagcaacagacagaggatgaactccaggataagatccatccttttgctcaaactcagtcactggtatatccattcccagggcccataccaaactctttgcctcaaaacatcccacctctcactcaaacccccgtcgttgtgccacccttccttcagccagaagtgatgggggttagtaaggtgaaggaagcaatggcacccaagcacaaggaaatgcccttccctaaatatccagtagagcctttcactgagtcacagtcacttacccttactgatgtagaaaatctgcatttgccacttcctttgctccaatcatggatgcaccagccccaccaacctctgcctcccaccgttatgttccctccccagagtgtgctgagtctgagtcaatcaaaagttctcccagtacctcagaaagccgtaccctatccccaacgtgatatgcccatccaggcttttctgctttatcaggagcctgtgctgggacccgtccgtggtcctttcccaattatcgta

SEQ ID NO: 493 - DNA, 672 bp, synthetic construct
  source 1..672: mol_type = other DNA
atgaaggtgctgatacttgcatgcctggtcgcccttgccttggccagagaattggaagagctgaacgtcccaggggagattgtggaaagtctttcctcatccgaagaaagcataacacgtataaataaaaaaatagaaaagttccagagtgaggagcaacagcaaactgaggatgaattgcaagataagattcatcctttcgctcaaacccaaagtctggtctacccctttcccggcccaattccaaacagtcttccacaaaacattcccccactgacccaaacacccgtagtcgtgccaccatttcttcaacctgaagtaatgggggtgtctaaagtgaaagaagcaatggcacctaaacacaaggaaatgcctttccccaaatatcccgtagagccatttactgaatcacaatccctgacactgaccgacgtagagaaccttcatctgccacttccactcttgcaatcttggatgcaccaaccacatcagccattgccacccacagtaatgttccctcctcaaagcgtcttgtcactgtctcagtcaaaggtcctccctgtaccccaaaaggcagtcccctaccctcagcgcgatatgcccatccaggctttcttgctttatcaagagccagtcctcggaccagttcgcggcccattccctataattgtg

SEQ ID NO: 494 - DNA, 672 bp, synthetic construct
  source 1..672: mol_type = other DNA
atgaaagtcctcattcttgcatgtttggtagccttggcattggcaagagaactggaggaattgaacgtaccaggtgagattgtagagagccttagcagttccgaggaaagcataacccgtattaacaagaagatagagaagtttcaatctgaagaacagcagcagactgaagacgaattgcaggataagatccaccccttcgcccagactcaatcactggtttaccccttccccggccccatccctaacagcctcccccaaaatatcccaccacttacccaaacccccgtcgtagtgcctccttttttgcaacccgaagtgatgggggtttcaaaggttaaggaggccatggctcccaagcataaggaaatgccctttccaaagtatcccgttgagccattcaccgaaagtcaatctctcactctgacagatgttgaaaacttgcaccttcctttgccccttctccagtcttggatgcaccaaccccatcagcctttgccaccaacagtcatgtttcccccacagtccgttctgagcctctcacaaagcaaggtactccctgtgcctcaaaaggcagtaccatatcctcagcgtgatatgcccatccaggctttcctcctctatcaagaaccagtgttgggaccagtgagagggccctttccaattattgtg

SEQ ID NO: 495 - DNA, 672 bp, synthetic construct
  source 1..672: mol_type = other DNA
atgaaagtgctgatccttgcatgtctggtggccttggctcttgcccgcgagttggaggaacttaatgtgcccggtgaaatcgtggagtcactctccagcagcgaagaaagtatcactcgtattaataagaagatcgagaagtttcagagcgaggagcaacagcaaaccgaagacgaactccaagataaaatccacccatttgctcaaacacaatccttggtttacccctttccaggacccattcctaacagtttgccccaaaatatcccacccttgacccagactcctgtggtggtgcctcctttccttcaacccgaggtgatgggggtgtccaaggtgaaagaggctatggcccctaaacacaaggagatgccattcccaaaatacccagtcgagcccttcaccgaatctcagtctctgacattgacagacgtagagaacttgcatctgcccttgccactcttgcagagctggatgcaccaaccccatcaacccctccctccaaccgtgatgttcccccctcaatccgtactgagcctcagccaaagtaaggtccttccagttccacagaaggccgtaccttacccccaacgcgatatgcccatccaggccttccttctctatcaggagcctgtattgggacccgtaagaggacccttccctataatagtt

SEQ ID NO: 496 - DNA, 672 bp, synthetic construct
  source 1..672: mol_type = other DNA
atgaaggttcttattttggcttgtctggtggctttggctctcgcccgcgagttggaggaacttaacgtgccaggtgagatcgttgaatccctcagctcaagtgaagagtcaatcactagaattaacaagaagatagagaagtttcaatctgaggagcagcaacagactgaggacgagttgcaggacaaaatccacccattcgcacaaactcagtctcttgtctatcctttccctggcccaatccctaactcactcccccaaaatatacctcccctcacccagactcctgttgtcgtgccacctttcctgcagccagaggtgatgggggtctcaaaagttaaggaggccatggcacccaagcataaagagatgccatttcctaaatatcctgttgaaccctttacagagtcacagagcctcacattgactgatgtagagaacctccaccttcctctccccttgcttcaaagctggatgcatcagccccaccagccacttcctcccaccgttatgtttccacctcagagcgtcctctccctctcacagagcaaggttttgccagtgccccaaaaagccgtcccatatccacagcgtgatatgcccatacaggcattccttctttaccaggaaccagtgcttgggcctgtacgcggtccatttcccataattgtc

SEQ ID NO: 497 - DNA, 672 bp, synthetic construct
  source 1..672: mol_type = other DNA
atgaaggtgctgattctggcttgcctggtagccttggctctggctcgtgagttggaagaacttaacgtacctggggagatagtcgagtccttgtcaagttccgaggaatccattacacgcataaacaaaaagatagagaaatttcagagcgaggaacaacagcaaactgaagatgaattgcaagataagattcatcctttcgcccaaacccaaagtctggtgtatccattcccaggtcccattcctaatagtctgcctcaaaatattccacctttgacccaaaccccagtggtcgtaccacctttcttgcagcccgaagtgatgggtgtctcaaaagtaaaggaagccatggcaccaaagcataaagagatgccctttccaaaataccccgtggaacccttcaccgaaagccaatctctcaccctcaccgacgttgaaaatctgcatctgcctctgcctctcctccaatcatggatgcaccagccccaccaaccattgcctccaactgtaatgtttcctccccagtcagttctttcactcagtcagtccaaagtattgcccgttccccagaaggctgtgccatatccccagagggatatgcctatacaggctttcctgctctatcaagaacctgttttgggtcccgtaagggggccatttccaataatcgtc

SEQ ID NO: 498 - DNA, 672 bp, synthetic construct
  source 1..672: mol_type = other DNA
atgaaagttttgattcttgcatgtttggtagcacttgctctggcccgtgaactcgaggagttgaacgtgcccggcgaaattgtggagtctttgtcatcaagtgaggagtcaattactcgcataaataaaaagattgaaaaattccaaagcgaagaacaacaacagactgaagatgagctgcaggataaaattcaccctttcgcacaaacccaatcattggtctaccctttccctggccctattcctaatagcctgcctcagaacattccaccccttactcaaaccccagtcgtcgtccctccattcctgcaacccgaggtaatgggcgtgtccaaggtcaaagaggcaatggcccctaaacataaggaaatgccttttcctaagtacccagtcgaaccattcacagagtcacaatctcttactcttactgacgttgagaacttgcatttgccactgcctcttctccagtcttggatgcaccagccacaccaacccttgccacctacagttatgttcccacctcaatccgtactctccctctcccagtctaaggtactgcccgtcccccagaaggctgttccatatccccaaagagacatgcctatccaggcttttctgctttaccaggaacccgtgctcggtcctgttaggggcccatttccaataattgtg

SEQ ID NO: 499 - DNA, 672 bp, synthetic construct
  source 1..672: mol_type = other DNA
atgaaagttctcattctcgcctgtttggtggccctcgctctcgctagggaattggaagagctgaacgtaccaggagagattgtagaaagcctcagtagtagtgaggaatccatcactaggatcaacaaaaagatagagaaattccagagcgaggaacagcagcagaccgaggacgagttgcaagacaagatccacccttttgctcagacccagagcttggtttatccatttccagggcctattccaaattcattgccacaaaacatacctcctctgacccagaccccagtcgtggtcccaccctttctgcagcccgaggtaatgggcgtcagtaaggtaaaagaagccatggcccctaagcataaggagatgccatttcccaaatatccagtagagccctttactgagagtcagtccctcacattgactgatgtggagaatttgcaccttcctctgccattgttgcagagctggatgcaccagcctcaccaacccctgcccccaactgtgatgttccctccacagagtgtattgtcactctctcagagcaaggtgctgccagttccccagaaagcagtaccataccctcagcgcgatatgcctatccaagcattcttgctctaccaggagcccgtcctgggtcccgttaggggccccttcccaatcatagtc

SEQ ID NO: 500 - DNA, 672 bp, synthetic construct
  source 1..672: mol_type = other DNA
atgaaggttttgatattggcatgtctggtggcactggctttggctcgtgagttggaagagttgaacgttccaggtgagatagtcgagtccttgagctcaagtgaggagagcattacccgtatcaacaagaaaatcgagaagtttcaatccgaagagcaacagcaaactgaggacgaacttcaagacaagattcacccattcgcacaaactcagtccttggtctatccctttcctggaccaatccccaactcacttccccagaacatcccccccttgactcagactcccgttgttgtaccccctttcctccagcccgaggtgatgggcgtgtccaaagtgaaagaggcaatggctcctaagcataaagaaatgccatttccaaaatacccagtcgaaccatttacagagtcacagtcccttacacttaccgatgttgaaaatctccatctcccacttcccctcctgcaaagttggatgcaccagccccaccaacccttgcctcccactgtcatgtttccaccccagagcgttctctcactttctcagtctaaagtattgcctgtaccacaaaaggctgtgccttacccccaacgtgacatgcctattcaagcctttcttctctatcaggagcctgttctcggaccagtacgtgggccttttcccattatcgtt

SEQ ID NO: 501 - DNA, 672 bp, synthetic construct
  source 1..672: mol_type = other DNA
atgaaggtactcattctggcatgtttggttgccttggctttggctcgcgaattggaagaacttaacgtaccaggtgagatcgtcgaaagtctgtcaagttccgaagagtcaataacaagaattaacaaaaagatagagaaattccaatctgaagagcagcagcagaccgaagatgaattgcaagacaagatccatccattcgcacaaacacagtccctggtgtatccattccccggccccattcccaattctttgcctcagaatataccacctctgacccaaacccctgtcgttgttcctccctttctccaaccagaggttatgggcgtaagcaaagtcaaggaagcaatggcccctaagcacaaagagatgcctttccccaaatatcccgttgagccattcaccgagtcccaaagtctcaccttgacagatgtcgaaaatttgcacctcccactcccccttttgcaatcctggatgcaccaacctcaccagcccttgcctcctacagtcatgttccctccccaatccgttctcagcctctcccaatcaaaagtgttgcccgtgcctcagaaggcagtgccctatccacaacgcgatatgcctatacaggccttccttttgtatcaggagcctgtacttggacctgtcagaggaccattcccaataattgtt

SEQ ID NO: 502 - DNA, 672 bp, synthetic construct
  source 1..672: mol_type = other DNA
atgaaagtgcttatacttgcatgcttggttgctcttgcattggcacgtgaactcgaagagcttaatgtcccaggcgagatagttgaaagcctttcctcaagtgaggaaagtataactcgtataaataagaaaattgagaagttccagtctgaagaacagcaacaaacagaagacgaactccaagacaagatccatccattcgcccagactcagtcattggtctatccctttcccggacctatccctaattctctcccccagaatatccctcctctcactcagactcctgttgtcgtaccccccttccttcagcctgaggtaatgggagtgtccaaggtcaaggaagctatggctcccaagcacaaagaaatgccttttcctaaatatcccgtcgaacccttcacagagtctcagagcctgaccctgaccgatgtagagaacctccatcttcctctgcccctccttcagtcctggatgcatcagcctcaccaaccccttccacctactgttatgttcccacctcaaagcgtactgtccctttctcaatccaaggtactgccagtgccacaaaaggcagttccctatccccagcgtgacatgccaatacaggctttcttgttgtaccaagaacctgtccttggtcccgttcgtggcccattcccaattatagtc

SEQ ID NO: 503 - DNA, 672 bp, synthetic construct
  source 1..672: mol_type = other DNA
atgaaggtactgatattggcttgtttggtcgccttggctctcgcccgcgaattggaggagttgaatgtccctggtgagatcgttgagagtcttagtagctctgaggaatcaattacccgtatcaacaaaaaaattgaaaaattccaatccgaagaacaacaacagaccgaggacgaactgcaggataagatccatcctttcgctcaaacacagtcattggtatatcccttccctggacccatacctaactctctcccccagaatatccccccactgacccaaaccccagttgttgttccccccttcttgcagcccgaggtaatgggtgtatcaaaagtgaaggaggccatggctcctaagcacaaggagatgcccttcccaaagtatcccgtcgaaccctttactgaatcccagtcactcactttgactgatgtcgagaatcttcatcttcccctgcctctcttgcagagctggatgcaccaaccacatcagcctctgcccccaacagtcatgttccccccacaatcagtattgagtctgagtcaatctaaagtcctgcctgtgccccaaaaggcagtcccatatccccaacgtgatatgcctatacaggcattccttctgtaccaagaacccgtcttgggacctgttcgtggacccttcccaatcatcgta

SEQ ID NO: 504 - DNA, 672 bp, synthetic construct
  source 1..672: mol_type = other DNA
atgaaagtcctgattctggcctgtcttgtagctttggcccttgctagagagcttgaggagttgaacgtaccaggtgagatagtcgaaagcctgagctcatctgaggaaagcatcactaggatcaataagaaaatagagaagttccagagtgaagaacaacaacaaacagaggatgaactccaggataagattcatcctttcgcacaaactcaatctcttgtctacccttttccaggcccaattcccaactccctgccacaaaatattcctccactgacccaaacaccagtagtggtcccccccttcttgcagccagaggttatgggagtatccaaggtgaaagaagctatggcacctaaacacaaagagatgccctttcctaaatatccagtggagcccttcaccgagtcccaaagcctgacactcactgatgtagaaaatcttcatttgcctttgcctcttcttcaatcttggatgcatcagccccaccagcccctcccacccactgtcatgttcccacctcaatctgtcttgtccctcagccagtcaaaagtcctgcccgtcccacagaaggcagtgccctatccacagcgtgatatgccaatacaagcattccttctctaccaggagccagtcctcggtccagtaagggggcctttccccataattgtc

SEQ ID NO: 505 - DNA, 672 bp, synthetic construct
  source 1..672: mol_type = other DNA
atgaaagtcttgatactcgcatgcctggtggcacttgctctggctagggaactcgaagagcttaatgttcctggagaaattgtagaatccctctcctcatcagaggagtcaatcactcgtataaacaagaaaatagagaaattccaatcagaagagcaacaacagaccgaagacgaactgcaagacaaaatccaccctttcgcccaaacacaaagtctcgtctatccttttccaggtccaatccctaacagccttccccaaaatatcccccctctcactcaaactcctgtggtcgtaccacccttcctccagcctgaggttatgggagtctccaaagttaaagaagctatggcacctaaacacaaggaaatgccttttccaaagtatcccgtagagccattcacagagagtcagagcctcacccttactgacgttgaaaaccttcaccttcctctcccacttcttcaatcctggatgcaccagccccatcaacccctgcctcctacagtaatgtttcccccacagtccgtgctctccctgagccaatccaaggtccttcctgtcccacagaaggccgtaccttaccctcaaagagacatgcctatccaggctttcctgctttaccaagagcctgtacttgggcccgtgaggggcccattcccaataatcgtc

SEQ ID NO: 506 - DNA, 672 bp, synthetic construct
  source 1..672: mol_type = other DNA
atgaaggtgcttatcctggcctgcctggtcgcccttgcccttgctagagaactggaagaactgaatgtaccaggagagattgtagaatctctgagcagctcagaggagagtatcaccagaataaataaaaagattgagaagttccaatctgaggagcagcagcagactgaagatgagctgcaggataaaatacacccctttgcacagacccagagtcttgtgtatccattccccggtccaattcctaactctttgccacaaaatatcccaccactcacccagactcccgtagtagtgcctccattcttgcagccagaagtgatgggtgtgtccaaggtaaaggaggcaatggccccaaagcacaaggagatgccttttcccaagtatccagtcgagccatttactgaaagccaatccttgaccttgaccgatgttgaaaacttgcatctcccacttccacttcttcaaagctggatgcaccaacctcaccagccactgcccccaactgtgatgtttcctcctcaatccgttctcagtctgtcacaatctaaggtactccctgtgccccagaaagcagtaccctatccccagcgcgacatgccaattcaagcctttttgctgtatcaggagcctgtgctcggtccagtcagaggaccctttcccatcatcgtc

SEQ ID NO: 507 - DNA, 672 bp, synthetic construct
  source 1..672: mol_type = other DNA
atgaaggttctgattcttgcatgtcttgtagcccttgctctcgcccgcgaactggaagaacttaatgttcctggtgagatcgttgagtctttgagtagttccgaagagtctataactcgtatcaacaagaaaatcgagaaattccaatctgaagaacagcaacaaaccgaagatgaacttcaggacaagattcatcctttcgcccaaactcagtccctcgtctacccattcccaggcccaattcccaacagtctgccacagaatattccaccacttacacagacccccgtcgtggttccaccattcttgcagcctgaggtgatgggggttagcaaagtgaaagaggccatggcacctaagcataaggagatgcccttccctaaatacccagtagaaccatttactgaatcccaatccttgactcttactgatgtcgagaacctccatctgccactgcctctgttgcaatcatggatgcatcagccacatcaacctctccctcccaccgtcatgtttcctccccagagcgtactcagcctttcacaaagtaaagttctgcctgtccctcaaaaggcagtaccttacccacagcgcgacatgccaatccaggcatttctgctgtatcaagaacctgtcctggggcctgttcgcggaccttttcctatcatagtc

SEQ ID NO: 508 - DNA, 672 bp, synthetic construct
  source 1..672: mol_type = other DNA
atgaaggttctgatactggcctgccttgtggctcttgctctcgcacgcgaactggaggaattgaacgtaccaggtgagatcgtagaatcattgtcatctagtgaagagagcataacacgtatcaacaagaaaattgaaaagttccagtccgaggagcagcaacaaaccgaagacgaactgcaagacaagattcaccctttcgcacaaacacagtcattggtttacccatttcctggacctatacccaattccttgccccagaacatccctccattgacacagacaccagtggttgtacctcctttcttgcaaccagaggtgatgggcgtaagtaaggtgaaggaagcaatggcccccaagcataaggagatgcctttccccaaataccctgtagaaccttttactgaatcccagagcctcacacttactgacgtggaaaaccttcaccttcccttgccactgctgcaaagttggatgcaccagccccaccagcccttgcccccaactgtaatgttccctcctcagtcagttttgagcctgagccagtctaaagttttgcccgtgcctcaaaaggccgtcccttacccacaaagggacatgccaatccaagcctttcttttgtatcaagaacctgtgctgggtcccgtacgtggtccatttccaatcattgtt

SEQ ID NO: 509 - DNA, 672 bp, synthetic construct
  source 1..672: mol_type = other DNA
atgaaggtattgatcttggcttgtctcgtcgcattggcccttgccagagaactggaggagttgaacgtccccggagaaatcgtcgagtccctcagcagttctgaagaaagcatcacaaggataaacaagaaaatcgagaaatttcaatcagaagaacagcaacaaacagaagacgaacttcaagataaaatacatccattcgcacagacccaatccttggtgtatccctttcccggtcccatccctaactccttgcctcaaaatattcccccactgacacaaactccagtagtggtccctccctttttgcaacctgaggttatgggtgttagcaaagtcaaggaggctatggctccaaaacataaggagatgccttttcctaaatatcccgtagagccttttaccgagagtcagtcactcactctcactgacgtagagaatcttcaccttcccctgcccctgctccagtcctggatgcaccagcctcatcagcctcttccacctacagtaatgtttcccccccagagcgtactcagcttgagccaaagcaaggtacttcctgtgccccaaaaagctgtcccatatcctcaacgtgacatgcctattcaagccttcctcctttaccaagagcccgtactcggccctgtgagaggaccctttcccatcattgtc

SEQ ID NO: 510 - DNA, 672 bp, synthetic construct
  source 1..672: mol_type = other DNA
atgaaggtacttatccttgcttgtctggtcgcattggcccttgcccgtgaattggaggaactgaatgtgcctggcgaaatagtcgaaagtttgtctagctctgaagaatcaattacacgtatcaataaaaagattgaaaagttccaatctgaagagcagcagcaaactgaggacgaactgcaagacaaaattcatccatttgcccaaacacaatctctcgtttacccatttcctgggccaattcccaattccttgccacaaaatatccccccattgacccagacacccgtcgtcgtacccccattcctccagcccgaagttatgggggttagcaaagtaaaagaggcaatggcacccaaacataaggaaatgcctttccctaagtaccccgtagagccttttactgagtcacaaagtttgacactcacagacgtagagaaccttcacctgcctcttcccttgctgcaatcatggatgcaccagccccaccagcctcttccacccacagttatgtttcccccacaatccgtactctcactttcacaatcaaaagtcctccctgtaccacagaaggctgtgccctatccacagcgtgatatgcctatacaagcattccttttgtatcaagaaccagtacttggcccagtacgtggacctttccccataattgta

SEQ ID NO: 511 - DNA, 672 bp, synthetic construct
  source 1..672: mol_type = other DNA
atgaaagtactgatacttgcatgtttggttgccttggctctggcaagggagcttgaagaattgaacgtgcccggtgagatagtggaatctctgtcctcaagcgaggagtcaataacccgtattaacaagaagatagaaaagttccagtcagaagagcagcaacaaacagaagacgaacttcaagataaaatccatccttttgctcaaacccagagccttgtctatccattccctgggcctatccctaactctctccctcaaaatatacctccattgacacagacacccgtggtcgttccacctttcctccagcctgaagtcatgggcgtgagtaaggttaaggaagctatggcaccaaagcataaagaaatgcctttcccaaagtatccagtggaaccttttactgagtcccagagcttgacacttacagacgtggaaaatttgcatttgccactgcctctgttgcaatcatggatgcaccagcctcaccaacccttgcctcccaccgtcatgttcccacctcagtctgtgctgtccctgtcacaaagcaaagtactccctgttccccaaaaagccgtaccttaccctcagagagacatgcctatccaagccttcctgttgtaccaagaaccagtgcttggacctgtgaggggcccatttcctataatagtc

SEQ ID NO: 512 - DNA, 672 bp, synthetic construct
  source 1..672: mol_type = other DNA
atgaaggtgctgatcttggcttgtctcgttgcactggccttggctagggagttggaggagttgaacgtacctggagaaatagtagaatctcttagtagttcagaggaatctataacccgtataaacaaaaaaatcgaaaaatttcaatctgaggagcaacagcagacagaggatgagttgcaagataagatccacccctttgcacagacccaatccttggtttacccatttcctggccccattcccaactcattgcctcagaacatcccacccctgactcagactccagtagttgtacccccttttctccaacccgaagtgatgggagtttctaaggtcaaagaagccatggcccctaaacataaagaaatgccctttcctaaatatcctgtagaacctttcacagaatctcagtcccttaccctgacagacgtggaaaatttgcacttgcctcttcccttgctccagtcttggatgcaccagccccaccagcctctgccacccacagtaatgttccctcctcagtctgtattgagtttgtctcagtctaaagttctcccagtacctcagaaagcagttccctatccccaacgtgatatgcctatccaagccttccttctgtaccaagagcccgtcctggggccagttcgcggacccttccctatcatcgtc

SEQ ID NO: 513 - DNA, 672 bp, synthetic construct
  source 1..672: mol_type = other DNA
atgaaagttctgattcttgcttgcctggtcgctctggcactggcccgtgaactcgaagaacttaacgtaccaggtgagatcgtcgaaagcctgtcctcatctgaggagtccatcactcgcattaacaaaaagatcgaaaagtttcaatcagaggagcagcagcaaacagaagacgaacttcaggataaaatacacccattcgcacagacccaaagtttggtctacccatttcccggacctatccctaatagtctgcctcaaaatattcctcccctgacccaaacccccgtagtagttccccccttccttcagcctgaagtgatgggggtctccaaggtgaaggaggcaatggctcccaaacacaaggaaatgccttttcccaagtaccctgtcgaaccctttactgagtctcagtcactgacccttacagatgtagaaaatctccacttgcccctgccccttcttcagtcatggatgcatcaacctcatcagcctctgccacctactgtaatgtttccccctcaatccgtccttagcctgagccaatccaaggttctcccagtccctcagaaggcagtgccatatccacagcgtgatatgcccattcaagccttcctcctttaccaagagcccgtgctcggccctgttcgtggaccatttccaataatagtg

SEQ ID NO: 514 - DNA, 672 bp, synthetic construct
  source 1..672: mol_type = other DNA
atgaaagtattgattctggcctgtcttgtcgcattggccctcgctagagagttggaagaattgaatgtgcctggggaaatcgtggaatctctgtcctctagcgaagagtccattacacgcatcaacaaaaaaatagagaagttccagtctgaagaacagcaacaaactgaagacgagctgcaagataagattcacccctttgcccaaacacagtcccttgtctacccatttcccggccctattcccaacagcctgccacagaacatccctcccctgacccagacacctgtcgtcgtacccccatttcttcaaccagaggttatgggggtctccaaggttaaggaggcaatggcacctaagcataaggaaatgccattccccaagtatcctgttgagcccttcaccgagagtcaatcactgacacttactgatgtcgaaaacttgcaccttccacttccattgctccagtcatggatgcatcaaccccatcaaccactcccaccaacagttatgtttcctcctcagtctgtgttgagtcttagtcaatccaaagtcctgccagtgcctcagaaggccgtcccttacccccagcgtgatatgcccatccaggcatttctcctttatcaggaaccagtattgggcccagtcagaggccccttccctataattgta

SEQ ID NO: 515 - DNA, 672 bp, synthetic construct
  source 1..672: mol_type = other DNA
atgaaggtcctgatcctcgcatgtttggttgcactggctcttgctagagaactcgaagaattgaacgtgcctggcgaaatcgttgagtccctgagttcatctgaagaaagtatcacccgcataaacaagaagatagagaaattccaatctgaagaacaacagcagactgaggatgaacttcaggacaagatacatcccttcgctcaaacccaatccctcgtttatccatttccaggtcccatacccaactccttgccccagaacatcccccccttgacacagactcctgtcgtcgtacctccttttctccaacccgaggtcatgggagtgagtaaggttaaggaagccatggcccctaaacataaagagatgccttttcctaaatatcctgtagagccctttaccgaatcccagagtctgactctcacagatgtggagaatcttcatcttcccctccctcttctgcaatcctggatgcaccagccccatcaacctctcccaccaacagttatgtttcctccacaatccgtgctgagcttgagtcagtccaaagtgttgcccgtgccacagaaagctgtgccctatccacagagggacatgcctatacaggctttcctcttgtaccaggaacccgtattgggccctgtaaggggaccattccccataattgta

SEQ ID NO: 516 - DNA, 672 bp, synthetic construct
  source 1..672: mol_type = other DNA
atgaaggtcctgattcttgcatgtcttgttgcactcgccttggctcgtgaacttgaagagcttaatgttcctggagaaattgtggaatcactgagttcctctgaggaatctattacaaggattaacaaaaaaatcgaaaagtttcagtctgaagaacaacagcagacagaagacgagctccaggataaaatacatccctttgcccagacacaatcactcgtatatcccttcccaggtcccattcccaacagcctgccacagaacatccctccactcactcagacacctgtcgtagtgccccccttcctccaacccgaagtcatgggagttagcaaagtgaaagaggctatggctcccaaacataaggaaatgcctttccccaagtatcctgttgagccttttaccgaatcacagtcactgacccttaccgatgtggagaatttgcaccttccactccccctcctgcagtcttggatgcaccaaccacaccagcccctgccacccactgtgatgttcccccctcagagcgttctttctttgagtcagtctaaggtcctccctgtgccacaaaaggctgtaccataccctcaaagagacatgccaatccaagcatttctcctgtaccaggagccagttctgggccctgtccgtgggccttttcccattattgta

SEQ ID NO: 517 - DNA, 672 bp, synthetic construct
  source 1..672: mol_type = other DNA
atgaaggttttgatcctcgcatgtcttgtagcccttgcacttgctcgtgaacttgaagaacttaacgtcccaggagaaatcgttgaaagcctgagtagtagtgaagagtccatcaccaggattaacaagaaaatagagaaatttcagtctgaagaacaacagcagaccgaggatgaactccaagataaaattcacccttttgcccagacacaatctttggtctacccattccccggcccaatccccaattcactcccacagaacattccaccccttactcaaactcccgtcgtagtacccccattcctccaacccgaagttatgggggtttctaaggtcaaagaagctatggcaccaaagcataaagagatgccatttcccaagtatcctgtcgagcccttcaccgagtcacaatccctcacattgactgacgtggagaatttgcatcttccccttccactcttgcagtcttggatgcaccaaccccaccagccattgcctcccaccgtcatgttccctccccaatctgtgctgtcactctcccaatctaaggtgctccctgttccacagaaggctgtgccctatccacagagggacatgccaatacaagcatttctgctgtaccaagaaccagtgctgggacctgtacgtggtcctttccctattattgta

SEQ ID NO: 518 - DNA, 672 bp, synthetic construct
  source 1..672: mol_type = other DNA
atgaaagtccttattctcgcatgcttggttgccttggccctcgctcgtgagcttgaagagcttaacgtccccggagaaatcgtcgaatccctgtcctcatcagaggaaagtataacacgcatcaacaagaagattgaaaaatttcagagtgaggagcagcagcagactgaagacgagctgcaagacaagattcatccattcgcacagacacagagtctggtctatcctttccctgggccaatccctaacagtctgccccagaacatacccccactgacccagacaccagtggttgttcccccatttctccaacccgaggttatgggcgtttccaaagtaaaggaagctatggcccctaagcataaggagatgcctttccctaagtacccagtagaaccctttactgaatcccagagccttaccctgactgacgtggaaaatttgcatttgccactcccccttttgcaatcctggatgcaccagccccatcagcctcttcctccaactgtaatgtttccccctcaaagtgtgctgtccctcagccagtctaaagttttgccagtaccccaaaaagccgtaccctatcctcagagagatatgccaatccaagcattcttgctctaccaggagcccgtccttggacctgttcgtggcccctttcccattatagtt

SEQ ID NO: 519 - DNA, 672 bp, synthetic construct
  source 1..672: mol_type = other DNA
atgaaagtgctgatccttgcctgtttggtggcccttgcccttgctcgtgaactggaagaactgaacgtccctggagaaattgttgaatcattgtcctcctcagaggagagcatcacccgcattaacaaaaagattgagaagttccaatctgaggagcaacagcaaacagaggatgagcttcaagacaaaattcaccctttcgctcaaactcagagtttggtgtatccttttccagggcctataccaaactctttgccacaaaacatccctcctctcacccaaacccctgtagtggttcccccttttttgcaaccagaagtcatgggcgtttctaaggtgaaagaagcaatggcccccaagcataaggagatgccttttcccaaataccccgttgagccattcactgagtctcaaagtcttacccttactgatgttgagaatttgcatcttccccttccactcctgcaatcttggatgcatcaaccccaccagccccttcccccaacagtcatgtttcctccacaaagcgtactcagcctcagccagagtaaggttctgcctgtacctcaaaaagccgtcccataccctcagagagatatgcccatacaggcattcctcctgtatcaagaacctgtgctcggtccagtaagaggaccctttcccattatcgtg

SEQ ID NO: 520 - DNA, 672 bp, synthetic construct
  source 1..672: mol_type = other DNA
atgaaggtactcatcttggcatgtcttgttgcattggctttggcaagggagcttgaggagctcaatgttcccggcgaaatcgtggaatcattgtcttcaagtgaagaatccattactcgtatcaacaaaaagatcgaaaagttccaaagtgaagaacagcagcaaaccgaggatgagttgcaggataaaatacacccatttgcacaaacccagtccctggtatatccttttcccggtccaattcccaatagtctgccccaaaatattccaccattgactcagaccccagtagttgtaccccctttcctgcaacctgaagtcatgggggtgagtaaggtaaaagaagctatggctcccaaacataaagaaatgccttttcctaagtatcccgttgaaccctttactgaaagccagagtctgacattgacagacgtagagaacctccatctccctctgcctcttctgcaatcctggatgcaccagccacaccaacctctccctccaacagtaatgttcccacctcaaagtgtccttagtctcagtcaaagtaaagtgttgcccgtaccacaaaaagccgtgccctaccctcagagggacatgccaattcaagcatttctgttgtaccaggagccagtgctcggccctgtgcgtggaccattcccaattatagtg

SEQ ID NO: 521 - DNA, 672 bp, synthetic construct
  source 1..672: mol_type = other DNA
atgaaggtactcatactggcctgcctcgttgccctcgctttggcacgcgagctggaagaactcaatgtaccaggcgaaatagtcgagtctctttcatcatcagaggaatccataacacgtatcaacaagaagatcgagaaatttcaatccgaggagcaacagcagaccgaagatgagttgcaagataaaatccatccctttgcccagactcaatctttggtctaccccttccccggtcccatccccaattcattgccacagaatatccctcctttgacccaaacaccagtagttgtaccccctttcttgcaacccgaggttatgggtgtatctaaggtaaaggaggcaatggcacccaaacacaaggaaatgccctttcctaagtatcctgttgagcccttcacagagtcccagtccctgactcttactgacgtagagaatctgcatcttccacttcctttgctgcaaagttggatgcaccaaccccaccaacccttgccaccaacagtgatgtttcctcctcaaagtgtattgagcctgagccaatcaaaagtcctgccagtgccacaaaaggccgtgccctacccacaaagagacatgcctatacaagcctttctcctttaccaggaacctgttctcggccccgttagggggccatttcccattatagtt

SEQ ID NO: 522 - DNA, 672 bp, synthetic construct
  source 1..672: mol_type = other DNA
atgaaggtgttgatacttgcttgtctcgtggcccttgctctcgctagagaactggaggagttgaatgtacctggggagattgtcgagtccttgagctctagtgaggaatcaatcacaagaattaacaaaaagatagagaaatttcagtcagaagagcagcagcaaacagaagatgagcttcaggataaaattcatcccttcgcacaaactcagagtctcgtgtatcccttcccaggacctatacccaattcacttccacaaaacatacctccccttacccaaactcccgtagtcgtgcccccctttcttcaaccagaagtgatgggagtgagcaaagtaaaagaagctatggctcccaaacacaaggagatgccattccccaagtatccagtagagccttttactgaaagtcagagcctgactctgacagatgttgaaaatttgcatcttccactccccctccttcagagttggatgcaccagcctcaccaaccactgccaccaacagtaatgtttccacctcagagtgtattgagcttgagtcaatctaaggttcttcctgtccctcagaaagcagtaccttatccccaacgcgacatgcccatccaggcattcttgttgtaccaggaaccagtgcttggccccgttcgcggcccatttcccataatcgta

SEQ ID NO: 523 - DNA, 672 bp, synthetic construct
  source 1..672: mol_type = other DNA
atgaaggtgttgatacttgcttgcctggttgcactcgctctggctcgcgagttggaagagcttaatgtccccggagaaattgttgaaagtcttagtagttctgaagagtccataaccagaatcaataaaaagatcgaaaaattccaatccgaagagcagcagcaaacagaggatgaactccaagataagattcaccccttcgctcagacacaaagcctcgtttatccttttcctggtcccatacctaacagtttgcctcagaacataccacccctgacccaaactccagtcgtagtgcccccttttctgcagcctgaggtgatgggggttagcaaggttaaggaggccatggcccccaaacacaaggaaatgccatttcctaagtaccccgtggagccctttacagaatcccaatccctcacccttaccgacgtcgagaacctccacttgcctctgcccctgcttcaaagctggatgcaccagcctcaccagcccttgccacccaccgttatgttccctcctcagtccgttctctccctgtcccagagtaaggtgctccccgtacctcaaaaagccgtgccctatccccaacgcgatatgcctattcaggcttttctcctctaccaagagcctgttcttggacctgttagaggtccatttccaataatcgtg

SEQ ID NO: 524 - DNA, 672 bp, synthetic construct
  source 1..672: mol_type = other DNA
atgaaagttctgatcctggcttgcctcgttgcacttgcactcgcccgtgaactggaagagctcaatgtgcctggtgagattgttgagtctctgtcttcatctgaggagagcattacacgcataaacaagaaaattgaaaaatttcagtcagaggagcaacagcagacagaagatgagttgcaggataaaatacatccattcgcacagactcagtctttggtttatccctttccagggcctatacccaacagtcttccccagaacattcctccactgacacagacaccagtagtcgtgcccccattcttgcaaccagaggtgatgggcgttagtaaagttaaagaggccatggctccaaagcacaaggaaatgcccttccccaagtacccagttgaaccttttacagaatcccaatctcttacactcactgatgtggagaacctgcatctccccctcccccttttgcaatcatggatgcaccaaccccatcaaccccttccacctactgttatgttccctccacagagcgttctttccctttcacagtctaaggtcctcccagtaccccaaaaggctgtgccatatccccaacgcgatatgcccatccaggcatttttgttgtaccaagaacctgtgcttggcccagttcgcggtccctttcccatcatcgta

SEQ ID NO: 525 - DNA, 672 bp, synthetic construct
  source 1..672: mol_type = other DNA
atgaaagtcttgattttggcttgcttggtcgctctcgcccttgctagagagttggaggaactgaacgtaccaggcgagatcgtagagtcccttagttcttcagaagagagtatcacaagaataaataagaagatagaaaaatttcaatcagaggagcaacagcaaactgaggatgagttgcaggataaaatacatccattcgcccagactcaaagccttgtatatccattccctggcccaattcctaactccctgccacaaaatattccccctctcacccagactccagtcgtggttcctccctttcttcagcccgaggtcatgggtgtcagtaaggtcaaggaagcaatggcacccaaacataaggagatgcctttccctaagtaccccgtagaaccttttacagaatctcaatccttgactctcaccgatgttgagaacttgcatctccctcttccccttcttcaatcatggatgcatcagcctcaccagcccctccctcctaccgtgatgtttcccccacagagtgtcttgagcctcagccagagcaaggtcctgccagttccacaaaaagccgtgccatacccccagagagatatgccaatacaggccttcctcctttatcaagaacccgtattgggacctgtaagggggcctttccctataatagtc

SEQ ID NO: 526 - DNA, 672 bp, synthetic construct
  source 1..672: mol_type = other DNA
atgaaggtacttattctcgcttgccttgtagctctggccctcgctagggaattggaagagctcaatgtccctggcgagatcgttgaatcattgtcctcatctgaggagtctatcacacgcattaataagaagatcgaaaaatttcaaagcgaggagcaacagcaaaccgaggacgagttgcaagataaaatacacccctttgcacagacacaaagtctggtgtaccctttcccaggcccaattccaaactctctcccccaaaacattccccctttgactcaaacccccgtcgtggtccccccctttctccagcccgaggtaatgggcgtatctaaggttaaggaagcaatggcacctaaacacaaagagatgcctttccccaaataccccgtggaacctttcacagagagccaatccctgacccttactgatgtagaaaatctgcacttgcccttgcctctgcttcaaagttggatgcaccaacctcatcagccactcccccctacagtgatgttccccccacagtccgtgttgtctcttagccagagtaaggttcttcctgttccccaaaaggctgtcccctacccccagagggacatgcctatacaagcattcctgttgtaccaggagcccgttctcggtcccgtgaggggaccctttccaataatcgtg

SEQ ID NO: 527 - DNA, 672 bp, synthetic construct
  source 1..672: mol_type = other DNA
atgaaggtgcttattctggcctgcctcgtcgctttggcccttgcccgcgaactggaagaattgaacgttcctggggaaatcgtcgagagtttgagtagcagcgaggaaagtataactagaatcaacaaaaaaatcgaaaaattccagagcgaggagcaacaacaaaccgaagacgaactgcaagataagatacatccttttgcccagacacaatccctggtgtacccattccctgggccaatccccaacagtcttccacaaaacatcccccctctgacacaaacccctgtcgttgtgcctcccttccttcaacccgaagttatgggagtaagtaaggttaaagaagcaatggcaccaaaacacaaagaaatgccatttcctaagtatcccgtagagccctttacagagtcccagagccttactctcaccgacgttgagaacctccatttgcccttgccactcttgcaaagctggatgcaccagccacatcaacctctgccacccacagtcatgtttccaccacagtcagtattgtcactctcccagtccaaggtattgcctgttccccaaaaagccgttccttatccccaaagagacatgcctatacaagcatttttgctctaccaggaaccagtgttgggacctgtgagaggtccattccccattatagtg

SEQ ID NO: 528 - DNA, 672 bp, synthetic construct
  source 1..672: mol_type = other DNA
atgaaggttctcatattggcctgcctggtggctcttgctctggctagagaacttgaggagctgaatgtgcctggagaaattgttgagtctcttagttcttctgaagagtccattactagaatcaacaagaaaatagaaaagtttcaatccgaggaacaacagcagacagaagacgagttgcaagacaagatacatccatttgctcagacacagtcacttgtctatccttttccaggtccaattcccaacagccttccccaaaatatccccccattgacacagacccccgtggttgtacctccatttctccagcccgaagtgatgggggtctctaaagtcaaagaagcaatggcaccaaagcataaagagatgccttttcccaagtacccagtcgaaccatttactgagtcacaatctctcactctcacagacgtcgagaacctccacctcccccttccattgcttcaatcctggatgcaccagcctcatcaacctctgcctccaacagtgatgttccctccccaaagtgtcctttccctctcacaaagtaaggtcctcccagttcctcagaaagccgttccatatcctcaacgcgacatgccaatccaggctttccttctgtaccaagaacccgtgcttggcccagtgcgtggaccctttccaattatcgta

SEQ ID NO: 529 - DNA, 672 bp, synthetic construct
  source 1..672: mol_type = other DNA
atgaaggttcttattcttgcctgcctggtcgcactggctctcgcaagggagttggaggagttgaatgttcccggtgaaatcgttgagtctctcagcagcagtgaagagtccataaccaggatcaacaaaaaaattgaaaaattccaaagcgaagagcaacagcagaccgaagacgagctccaagacaagatacacccatttgcacaaacacagagcctcgtctatccatttcctggtcctatacctaacagcctcccccagaatataccaccactgactcaaacccccgtagttgttcccccttttttgcagcccgaggttatgggtgtgtccaaagttaaagaagctatggctccaaagcataaagagatgcctttccccaaatacccagtcgaacctttcactgagagtcaaagccttacattgactgacgttgagaacttgcacctccctctcccacttttgcaatcctggatgcatcagccacaccagccccttcccccaactgtgatgttccctcctcaaagcgtcctgtcattgtctcaaagtaaggttctgccagttcctcagaaggccgtgccctatcctcagagagacatgcccatccaagcattcctcctctatcaggagccagtcctcggtcccgttcgcgggcccttcccaataatcgtg

SEQ ID NO: 530 - DNA, 672 bp, synthetic construct
  source 1..672: mol_type = other DNA
atgaaggtattgatcctggcctgcttggtagcactcgctctcgcaagggagcttgaggagcttaacgtgccaggtgagattgttgaaagtttgagcagctctgaggaatctataactcgtatcaacaagaagattgaaaagttccaatctgaagaacagcagcaaactgaggatgaactccaggacaaaatccaccccttcgctcagactcaatctcttgtatatccttttcctggacctattcctaacagcctccctcaaaatataccacccctcacacaaacccccgttgtcgtaccaccatttctgcaacccgaagttatgggtgttagcaaagtgaaagaagccatggctcccaagcacaaggaaatgccattcccaaaatatccagtagagccattcacagaatctcagagcctcacccttactgacgtagaaaatctccatcttcccctgccattgctgcaatcttggatgcatcaaccacaccagcctctgcctccaacagtgatgtttcctccacaatccgtactttccttgtcacaaagtaaagtcctgcctgtaccccaaaaagcagtaccctatccacaaagggacatgcccatacaagccttcctcctgtatcaagaaccagttcttggccctgtgcgcgggccttttccaatcatagtg

SEQ ID NO: 531 - DNA, 672 bp, synthetic construct
  source 1..672: mol_type = other DNA
atgaaagtacttatattggcctgccttgtcgcacttgctttggcccgcgaactggaagaactgaacgtaccaggcgagatcgtcgagtctctttctagctcagaggagtctattactagaatcaacaaaaaaatagaaaagtttcagtcagaggaacaacagcagacagaggatgaacttcaggataaaatacacccatttgcccagactcagtctctcgtttacccttttccaggtccaatacctaattccttgccccagaatatacctcccctcacccagactcctgtagtagtacctccctttctgcaaccagaagtcatgggggtgtcaaaagttaaagaagccatggctccaaaacacaaggaaatgccttttccaaaataccccgtggaaccatttaccgagtctcagtctctgacactgacagatgtagaaaacctgcacttgcccctcccacttctccagtcatggatgcatcagccccatcaacccctgcctcccactgtaatgttccctccacaaagcgtactctccctttcccagtctaaggttctccctgtgccacaaaaggcagtgccatacccacaaagggacatgcctatacaggcattccttctctaccaggagcccgtccttggacccgttcgcggaccctttcccataatcgta

SEQ ID NO: 532 - DNA, 672 bp, synthetic construct
  source 1..672: mol_type = other DNA
atgaaggttctcattttggcttgtctcgtcgcattggctctggcccgtgaattggaggaattgaatgtgcctggggaaatagttgaatccctctcctcctctgaagaaagtatcactagaatcaataaaaagattgagaaatttcaaagtgaagaacaacaacaaacagaggatgagcttcaggacaaaattcaccccttcgctcagacccagtctttggtgtaccctttccctgggcctattccaaacagtcttccacaaaatataccaccactgacacagacaccagtcgtcgtgccacctttcttgcagcccgaagtaatgggggttagcaaagttaaagaagctatggcccctaaacacaaagagatgccttttccaaaataccctgtcgaaccctttactgagtcacaaagcctcacacttactgacgtcgagaacctgcacttgccactgcctctgctccaatcttggatgcaccagccacaccagccactgccccccacagtgatgttccccccacaaagtgtccttagtctcagtcaaagtaaagtcctccccgtaccacagaaagctgttccataccctcaacgtgacatgcccatacaagcattcctgctttaccaggagccagttcttggccccgtccgtggtcctttccctattattgtc

SEQ ID NO: 533 - DNA, 672 bp, synthetic construct
  source 1..672: mol_type = other DNA
atgaaggtcctcatattggcttgtcttgtagctctcgccctggcaagggagttggaggagttgaacgtgcctggagaaattgttgaatccctgtcttcctctgaagaatctattactaggatcaacaaaaaaattgaaaaatttcagtcagaagaacagcagcaaaccgaggatgagctgcaagataaaatacacccttttgcccagactcaatccttggtgtaccccttccccggacccatccccaactctttgccacaaaacattcctccactcacacaaactcctgtcgttgtaccccctttcctccaacctgaggtaatgggagtgtctaaggtgaaagaagctatggccccaaagcacaaagagatgcccttccctaagtatccagtagagccctttacagagtctcaaagcctcacactgacagacgttgaaaatctccacctgccactgcccctccttcagtcttggatgcaccaaccccatcagccattgccacctactgtaatgttccccccacagagcgtactttccctctctcagtccaaggtacttcctgtgcctcaaaaagctgtgccatatccccagcgcgatatgcccatccaagccttcctgctttatcaggaaccagttctcgggccagtaagagggccttttcctattattgtg

SEQ ID NO: 534 - DNA, 672 bp, synthetic construct
  source 1..672: mol_type = other DNA
atgaaagttcttatactcgcctgcctcgtggcactggcactcgccagggagcttgaggaactgaacgtgcctggcgaaatcgtggaatctcttagttcaagcgaagaatccatcactcgtatcaacaagaaaatcgagaaattccagtccgaggaacagcaacagacagaagatgagttgcaggacaagatccatccctttgcccaaacacagtctctggtttaccccttccccggccccatacccaactctcttccccagaatattccacctttgacccagacacccgtcgtagtgccccctttcttgcaaccagaggtcatgggtgtcagtaaggtgaaagaggctatggctcctaaacacaaggaaatgccatttcctaagtaccccgtggaaccatttacagagagtcaatccttgactcttacagacgtagagaatcttcatctccctctcccactcctccagtcctggatgcaccagccacatcagcctctcccccctactgtaatgtttccaccccagagcgtactgagcctctcacagagcaaggtcctcccagtacctcagaaggctgtcccatacccacagcgcgatatgcccatacaggcttttctcctttaccaagagcctgtcctcggaccagtccgtggtcccttccctattatagtg

SEQ ID NO: 535 - DNA, 672 bp, synthetic construct
  source 1..672: mol_type = other DNA
atgaaggtccttatattggcttgtctcgtcgcactggccctggccagggaactcgaagaactgaatgtcccaggcgaaatagtagagtccttgtctagttcagaggaatctattacacgcatcaacaaaaagatagaaaagttccagtcagaagaacagcagcaaacagaagatgaactccaggataagattcatccatttgcacaaactcaatctcttgtctaccccttcccaggtccaattccaaattccttgcctcaaaacattcctcctctgacacagacacctgtcgtcgttccacccttcttgcaacctgaagtgatgggggtgagcaaagtaaaggaggctatggcacccaagcataaggaaatgccttttccaaagtatccagttgagcctttcacagagtctcagtcattgacccttaccgacgtggaaaacctccatcttcctcttccccttttgcagtcatggatgcaccagcctcatcaacctctgccacccacagtaatgtttcctccacaatctgtcttgagcctttcccagagcaaagtccttcctgttccacagaaggccgtcccatacccccaacgtgacatgccaattcaggcttttctgctgtatcaggaacccgtattgggaccagtaagaggaccctttcccatcattgta

SEQ ID NO: 536 - DNA, 672 bp, synthetic construct
  source 1..672: mol_type = other DNA
atgaaggttctgatactggcatgtctggttgctcttgccctcgcacgcgagctcgaagagttgaatgttcctggcgagattgttgaatcattgtccagctctgaggagtcaataacccgcataaacaaaaaaattgaaaaattccagtccgaagagcagcaacaaaccgaagacgaattgcaggataaaatccacccctttgcccagacccagagtctggtgtaccccttccctggacctataccaaatagccttcctcagaatattcctcccttgacccaaactccagtcgttgtaccacccttcctgcaacctgaagttatgggtgtgtctaaagtaaaggaagctatggctccaaaacataaagagatgccttttcccaaatatcctgttgagccattcactgagagtcagagcctcactctcactgacgtagagaatctccaccttccattgccattgttgcaatcatggatgcaccaaccacatcaacctttgccaccaaccgtcatgtttcctccccaatccgtacttagccttagccaatccaaagtactccctgttcctcaaaaagcagtcccttatccacaacgcgatatgccaatacaggctttccttctttaccaggagcctgttcttggacccgttcgcggtcctttccctatcattgtg

SEQ ID NO: 537 - DNA, 672 bp, synthetic construct
  source 1..672: mol_type = other DNA
atgaaggttttgatccttgcctgtctcgtcgcacttgctctcgctagagagcttgaagaactcaatgtgcctggagaaatagtcgagagcctcagttcctctgaagaatccatcacccgcatcaacaagaaaatagagaagtttcaatcagaagagcaacagcaaacagaggatgaacttcaagataagatacaccccttcgcccaaacccagtctttggtttaccccttccctggtccaatccccaattcactcccccaaaatataccaccattgactcagacccctgtcgtcgttcccccttttctccaacccgaagtcatgggggtctccaaggtcaaagaggctatggctcctaagcataaggaaatgccttttcccaaatatccagttgaacctttcacagaatcacaatccttgactttgactgatgttgaaaacctccacctccctttgccactcttgcagagctggatgcaccaaccccaccaaccattgcctcccaccgtgatgttcccaccccaaagcgtgctgagtctttcacaaagtaaagtcctgcccgtccctcagaaggcagttccctatcctcagagagacatgcccatacaggcattccttctgtatcaggaacctgttcttgggcctgttagaggcccattccctatcatagta

SEQ ID NO: 538 - DNA, 672 bp, synthetic construct
  source 1..672: mol_type = other DNA
atgaaagttctgatccttgcttgtctggtcgccctcgccctcgctcgtgaacttgaagaactcaatgtgcccggtgagatcgttgagagtttgtcctcctccgaagagtccatcacaagaataaacaaaaaaatcgaaaaattccaaagcgaagagcaacagcagaccgaagatgagctccaggacaagattcatccttttgctcaaactcaaagtctcgtatatcccttccccggacctattcccaactctttgccccaaaacataccaccacttacccagacacctgtcgtcgtgccacccttcctccaacccgaggttatgggcgtatcaaaagtgaaggaagccatggctcccaagcacaaagaaatgccattccccaaatatcctgtggaaccattcactgagtcacagtccctgaccttgaccgatgttgagaacttgcatctccccttgcccctgctccaatcatggatgcaccagcctcaccagccattgccaccaactgtaatgtttcccccccaatccgtacttagtctctctcaatcaaaagttcttcctgtgcctcaaaaggcagtaccctatccacagagggacatgccaatccaagcattcttgttgtaccaggaacctgtgcttgggccagtgcgcgggccttttcctattatcgtt

SEQ ID NO: 539 - DNA, 672 bp, synthetic construct
  source 1..672: mol_type = other DNA
atgaaagtgcttatattggcctgccttgttgcactggctcttgcaagggagctggaggaactgaatgtacccggcgaaatagtcgaatcactgagtagtagtgaggagtctataactagaattaacaagaaaatcgaaaagtttcagagcgaggaacaacaacagacagaggacgagctccaggataaaatacatccctttgcacagacacaaagcctcgtatatccttttcctggtcctataccaaactcattgccccaaaatatacctcctctcactcagacacccgttgttgtgccccccttcctgcagccagaggtgatgggggtctcaaaagttaaggaggctatggctccaaagcataaagagatgccattcccaaagtatccagtagagcccttcactgaaagtcaaagtttgacactcacagatgtagaaaatctgcacttgcccctgccccttttgcaatcttggatgcaccaacctcatcagcccttgcccccaactgtgatgttcccacctcagtccgtgttgtccctttcacagtctaaagtgcttcctgtccctcaaaaggctgtaccctatcctcaacgcgacatgccaatacaggcattccttttgtaccaagagcccgtactgggaccagtcagaggtcctttccctatcattgta

SEQ ID NO: 540 - DNA, 672 bp, synthetic construct
  source 1..672: mol_type = other DNA
atgaaggtcctcattttggcatgtctggtagctctcgcacttgctagggaacttgaggaactcaatgtacctggggaaatagtcgaatcactgagctcctctgaggagagcataacccgcataaataaaaagatagagaagtttcaatctgaggagcaacaacagactgaggatgagctgcaggacaagatccacccttttgctcaaacacaaagtctcgtttatccttttcccggccctattcccaattcattgcctcagaacatcccccctctcactcagactcctgttgtggttcccccattcctgcagcccgaagttatgggggtgagcaaagtaaaggaggccatggcccctaaacataaggagatgcctttcccaaaatacccagttgagcccttcaccgaaagccagtccttgactttgactgatgttgagaacctccatctcccattgcctttgttgcaatcatggatgcatcagccacatcagccacttccccctacagtgatgttcccaccccagtctgttctctcactctctcaatcaaaggtactcccagtcccacagaaagctgtaccatacccacagagggacatgcccatccaggctttcctcctgtaccaggaacccgtcttgggacccgtcagaggacccttcccaattatcgta

SEQ ID NO: 541 - DNA, 672 bp, synthetic construct
  source 1..672: mol_type = other DNA
atgaaagttcttattttggcttgtctcgtagctttggctctcgctagggagctggaggaactgaacgttcctggcgaaatcgtggaatccttgagtagcagcgaggagagtataactaggatcaataagaagatcgaaaagttccaatccgaagagcaacaacagacagaggacgagctgcaagacaaaatacatccattcgctcagactcagtccctcgtgtaccccttcccaggccctattcccaatagtcttccacaaaacattccacctctgacacaaactcccgttgttgttcccccctttctgcaacccgaggttatgggagtaagtaaggttaaggaggctatggctcccaaacataaagaaatgcctttccctaagtatcctgtagaaccattcacagagagccagagcttgactctgaccgatgtagagaaccttcacctgcctctgccacttctccaatcttggatgcaccagccccatcaacctcttccaccaaccgtaatgttcccaccacagtcagttctttccttgtcccaatccaaggtactgcccgtccctcaaaaagctgttccctacccacagcgtgatatgcctattcaagcctttctcttgtatcaagaacctgtacttggcccagtgaggggaccttttcctattattgtg

SEQ ID NO: 542 - DNA, 672 bp, synthetic construct
  source 1..672: mol_type = other DNA
atgaaggtccttatcttggcatgtctggttgccctcgcactcgcacgtgaactggaagaattgaatgtacctggcgaaatcgtcgagagcttgtcctcctcagaggaatcaatcacacgtatcaataaaaaaattgaaaaattccaatctgaagaacagcaacagacagaagatgaattgcaggacaaaatacacccatttgctcaaacacaaagtctcgtctacccatttccagggcctatccctaactccctgcctcagaatatccctcccctgactcaaaccccagtggtagtcccccctttcttgcagcccgaagtcatgggtgtgtcaaaagtgaaggaggcaatggctcctaaacataaagagatgccattccccaaataccctgtagaaccctttactgaaagtcagagcctcacacttaccgatgtagagaatctgcatttgcctcttcccctgttgcagtcttggatgcatcagcctcaccaacctcttcctccaactgtcatgttcccaccacaatcagtcctttctctctctcagtctaaggttctccctgtaccccaaaaggctgtaccatacccacaacgtgacatgcccatacaggcctttctcctgtatcaggaacctgtattgggtcctgtacgcggccctttccccattatagta

SEQ ID NO: 543 - DNA, 672 bp, synthetic construct
  source 1..672: mol_type = other DNA
atgaaggtgctcatcctggcctgtcttgtggcacttgctctggcccgtgaacttgaagaacttaacgtcccaggagaaatcgtcgaatccctctctagctccgaggaaagcatcactagaattaacaagaagattgagaaattccaatctgaggagcaacaacagactgaggacgagcttcaggataaaatccacccatttgcacagacacagagtcttgtttatccttttcctggacctattcccaattcactcccccagaacatacccccactgacccagacacccgttgtagtcccaccatttctccaaccagaagtcatgggagtcagtaaggtaaaggaggcaatggcacccaaacataaagagatgcctttccccaagtaccctgttgagccattcacagaatcacaaagcctcactcttacagatgtggagaatttgcatctgcccctccccctcctccaatcatggatgcaccaaccacaccagccacttccccctaccgtaatgttcccacctcagagcgtactcagtttgtcccagtctaaagtgttgcccgttcctcaaaaagccgtaccatacccccaacgcgacatgcctattcaagctttccttctttaccaggagcctgtactggggcctgtgcgtgggccattccctataattgtc

SEQ ID NO: 544 - DNA, 672 bp, synthetic construct
  source 1..672: mol_type = other DNA
atgaaggtcttgatccttgcctgtctggtcgctctcgccctggcaagggaactggaggagctgaacgtaccaggggagatcgtggaatctcttagtagttctgaagagagcatcaccaggataaataaaaaaatagagaagttccagtcagaggagcaacagcagaccgaggatgaactgcaggataaaatacatccatttgcccaaacacaaagtcttgtgtatccattccctggccctatcccaaactctttgcctcaaaacatcccaccactgactcagacacctgtcgtggtgcctccattcttgcagcccgaagtaatgggcgttagcaaggtcaaggaagctatggcaccaaagcataaggaaatgcctttcccaaagtaccctgtcgagccctttaccgagtcacagtcattgactttgactgatgtggaaaatcttcacctccccttgccccttctgcaatcttggatgcatcagccccatcagccattgccacctactgtgatgttccctccccaaagcgtgctttccctttcacaatccaaggtgttgcccgtaccacagaaagctgttccctacccacaaagggacatgccaattcaggcattccttctttaccaagaacccgttctcggccctgttaggggaccattcccaataatcgtg

SEQ ID NO: 545 - DNA, 672 bp, synthetic construct
  source 1..672: mol_type = other DNA
atgaaggtgctgatccttgcttgtcttgttgcattggctctcgccagggaattggaggaacttaatgtccccggtgaaatcgtcgaatccctttcctcatccgaagaaagtatcaccaggatcaacaaaaaaatagagaaattccaatctgaggaacagcaacagaccgaggacgagttgcaggacaagatccaccccttcgcccaaacacagagcctcgtgtacccattccctggaccaattccaaatagcctgcctcagaatatcccaccacttacccagacacccgtggttgtccccccctttctccagccagaggtgatgggtgtctcaaaagtcaaggaagctatggcacccaaacataaagaaatgccttttcctaaataccccgtagaaccatttacagaaagccagtcacttaccttgaccgatgttgagaacctccatttgccactgccacttctgcaatcttggatgcatcagccacatcaaccactgccacctacagttatgttccctccacagtccgtacttagtcttagtcagtcaaaagtcctgcctgtgccacaaaaggctgtaccctatcctcaacgtgatatgccaatccaggcattcctgctctaccaagaaccagttttgggtccagttagagggcccttccccattatagtt

SEQ ID NO: 546 - DNA, 672 bp, synthetic construct
  source 1..672: mol_type = other DNA
atgaaggttctcatacttgcttgccttgtcgcattggcactcgccagggaactggaagaacttaatgttccaggagagatcgtagagtctctgtcttcatctgaggagtctatcaccaggataaacaagaaaattgagaagttccagtcagaggaacaacaacaaactgaagacgaacttcaggataagatacacccttttgctcagactcaatcccttgtctatccatttcctggtcccatccccaattccctcccccaaaacataccaccattgactcagacccccgtcgtggtacctccattcctccagcccgaggttatgggagtatctaaagtgaaagaggccatggcacctaaacataaggagatgcccttccctaagtatccagtagagccatttactgagtctcaaagtctcaccctcacagacgttgaaaatctccatctgcccctgcctcttctgcaatcctggatgcaccagccccatcagcctctcccacccacagtaatgttccctccacaatccgtactctcattgagtcagagtaaggtcctgcctgtgccacaaaaggccgtgccctatccccaacgtgacatgcccattcaagcatttctgctgtaccaggaacctgtactcggccctgtaaggggaccttttccaattatcgtt

SEQ ID NO: 547 - DNA, 672 bp, synthetic construct
  source 1..672: mol_type = other DNA
atgaaggtactcattctcgcttgcctggttgccctggctttggcacgtgagctcgaagagctcaatgtccctggcgagatcgtagagtccctgtcaagctccgaagaatccatcaccagaataaacaaaaagatagaaaaatttcaatctgaagagcaacaacaaacagaggacgaattgcaagataagatccatccattcgcccagactcaatccctggtttatcccttcccaggtcctattcctaactccctgcctcaaaacattccaccactgacacaaaccccagtagttgtaccaccatttttgcagcccgaggtaatgggagtcagtaaggtgaaagaagccatggcaccaaaacataaggagatgccctttcctaagtatcccgtagagccattcaccgaaagccagagtctgacattgactgatgtagaaaacctccaccttcccttgcccctgttgcaatcatggatgcaccagcctcaccagcccctgccaccaaccgtgatgtttcccccacaaagtgttttgtcattgtcccaatccaaggtactccccgtcccacagaaagccgtcccctatcctcagcgcgacatgcccattcaggcattcctcttgtatcaagagcccgttctcggccctgtgcgcggcccatttcccataattgta

SEQ ID NO: 548 - DNA, 672 bp, synthetic construct
  source 1..672: mol_type = other DNA
atgaaagttctgatcctggcctgtttggtggctcttgccctggccagggaactcgaagaactgaacgtccccggcgaaattgttgaatcactgtcaagttcagaggagtccataactcgcataaataaaaaaatagagaaattccaatctgaggagcaacagcaaaccgaagatgaactgcaggacaaaattcatccctttgcacagacccagtcattggtttatccatttcccggacccataccaaactctctccctcaaaacattcctcccttgacccaaacaccagtggtggtgcctccatttctgcaacctgaagtgatgggcgtatccaaggttaaggaagctatggccccaaagcacaaggaaatgcccttcccaaagtaccccgttgagccattcacagaatcccagagcttgaccttgacagatgtcgagaatctccaccttcccctcccccttttgcagagctggatgcaccagccccatcagcccctgccccctaccgtaatgttcccccctcagtcagttcttagcttgtcccaaagtaaagttttgcccgtgccacagaaagctgtgccttacccccaacgcgacatgcccatacaggctttcctgctctaccaagaacccgtcctcggacctgtcaggggcccatttcctatcatagtt

SEQ ID NO: 549 - DNA, 672 bp, synthetic construct
  source 1..672: mol_type = other DNA
atgaaagtgctcattctcgcttgtctcgtagccctggccctcgcccgcgagcttgaggaactcaacgtgcccggagagattgttgaatctctgtcttcctctgaggagtccataactaggattaataaaaaaattgaaaagttccagagcgaagagcagcagcagactgaagacgagcttcaagataaaatccacccctttgcccagacccaatctcttgtgtatccatttccaggtcctatccctaattccctgcctcaaaacatcccaccacttactcagacccctgtggtggttccaccatttctgcagcccgaggtcatgggcgttagcaaagttaaggaggctatggctccaaaacacaaagaaatgccatttcccaagtaccctgttgagccattcacagaatcacagagcctgacactcaccgatgtcgagaacctccatctccctcttccccttcttcagtcttggatgcaccaaccacaccagcccctgccacctactgtgatgtttccaccacaaagtgtacttagcctctcacaatctaaagttcttcctgtgccccagaaggccgttccttacccccagagggatatgccaatacaggccttcctcctctatcaggaacctgtactcgggcctgtaagggggccattcccaattatcgtg

SEQ ID NO: 550 - DNA, 672 bp, synthetic construct
  source 1..672: mol_type = other DNA
atgaaagttttgattctggcttgccttgttgcccttgcacttgctagggaactggaggaattgaacgtacctggtgaaatcgtggagtccctcagtagctcagaggaaagcatcaccaggattaacaagaagatagaaaagttccaatcagaggagcagcaacagacagaggacgaactccaagacaaaatacacccttttgctcagactcagagtcttgtgtatccatttcccggaccaattcccaatagtctgccacagaacatccctcctctgacacaaactcctgttgtcgtgcccccctttcttcaaccagaggtcatgggtgtgtctaaggtcaaagaagcaatggcccccaaacataaagagatgcctttccctaagtatcccgtcgagccattcacagagagtcagtctcttaccttgactgatgttgaaaatctgcacttgccacttcccttgttgcaaagttggatgcaccagccacaccagcccttgccccctaccgtcatgttccccccacaaagcgtgttgtccctgtcccaatccaaggtgttgcccgtacctcaaaaggctgtaccttacccacaacgcgatatgccaattcaagcttttctcttgtatcaagaacccgttcttggaccagtgagagggccttttccaataatagtg

SEQ ID NO: 551 - DNA, 672 bp, synthetic construct
  source 1..672: mol_type = other DNA
atgaaagtccttatactggcctgtctcgtagcacttgctcttgcccgcgaactcgaagagctgaacgtcccaggtgagatagtagaaagtttgtcctcctccgaagagtcaattacacgtataaataagaaaattgagaagttccaatccgaggagcaacagcagacagaagatgagcttcaagacaagatacatccctttgcccagacacagtctctggtctaccccttccccggacctatccctaatagtcttccccaaaatataccccctcttactcaaacacccgttgttgttcctccatttctgcaacccgaagtcatgggggttagtaaggttaaagaggccatggcaccaaaacacaaggagatgccttttcccaagtatcccgtcgagcccttcaccgaatcacaaagtctcactctcactgacgttgagaatctccacctcccactgccactcctccaatcctggatgcaccagcctcaccaaccacttccacctaccgtcatgtttccaccccagagcgttttgagcctttctcaaagtaaggtgctgcctgttcctcagaaagctgtgccttaccctcaaagagatatgcctattcaggcttttttgctttaccaagagcccgttttggggcctgtcaggggacccttccctatcatagtg

SEQ ID NO: 552 - DNA, 672 bp, synthetic construct
  source 1..672: mol_type = other DNA
atgaaggtcttgatccttgcctgcttggtcgcactggcccttgcccgtgagctggaagagctcaatgtgcccggtgaaattgtagagtcattgtcatcatctgaggagtctattacccgcataaacaaaaaaatcgaaaagttccaaagcgaagaacagcaacagaccgaggacgagttgcaggacaaaattcatccattcgcacaaacccagtccctggtctacccttttcccggacccattcctaactctctgccccagaacatcccccctcttactcagacccccgtcgtcgtgcctccctttttgcaacctgaggtgatgggtgtctccaaggtcaaggaagcaatggcccctaaacacaaagaaatgcccttccctaagtaccctgtggagccattcactgagagccaaagccttacactcacagacgtggaaaatcttcatttgccactgccactgctccaatcatggatgcaccagcctcatcaacctctcccacccaccgtcatgtttccccctcaatctgttttgtccctgtctcagtctaaggtgctcccagtccctcagaaggctgtaccttatccacaaagggacatgccaatccaagccttcctcctgtatcaggaacctgtacttggcccagtacgcggacccttccctattatcgtt

SEQ ID NO: 553 - DNA, 672 bp, synthetic construct
  source 1..672: mol_type = other DNA
atgaaggtccttatccttgcctgcctcgtcgctctggctcttgctcgtgagctggaggagctgaacgtaccaggcgagatagtagaatccctgtcctcctccgaagaatctatcaccaggatcaacaagaaaattgagaagttccagagcgaggagcaacagcaaactgaggatgagctgcaagacaagattcacccctttgcccaaacacagtcacttgtttatcctttccctggacccatccctaattccctccctcaaaacattccccccctgacccagactccagtggtagtcccacctttcctccaacctgaagtcatgggtgtttccaaggtaaaagaggctatggccccaaaacataaagagatgcccttcccaaagtatcccgtagagccattcaccgagtcacaatctcttacattgacagacgtggagaaccttcatctgcctttgcctctgttgcagagctggatgcaccagccacaccagcctctgcccccaaccgtaatgtttcccccacaaagcgtactgagtcttagccagagtaaggtcctcccagtccctcaaaaagccgtaccctatcctcaacgcgacatgcccatccaagcattcctgctctaccaggaacccgttctcggtccagtgcgtggccccttcccaattattgta

SEQ ID NO: 554 - DNA, 672 bp, synthetic construct
  source 1..672: mol_type = other DNA
atgaaggttcttatcctcgcttgcctcgtagccttggccctggctagagagttggaggaactcaacgtgcccggtgagatcgtggaatcacttagcagctccgaggaatctataacacgcataaataagaagattgagaaattccagagcgaagagcaacaacagaccgaggatgagctgcaagacaaaattcacccttttgctcaaactcagagtctcgtctatccattccctggcccaatcccaaactctctgccacaaaacatacccccactgactcagacccctgtcgtagtgcctccattcctccagcccgaggtaatgggagttagcaaggtcaaggaagcaatggcaccaaagcacaaagaaatgccatttccaaagtatccagtcgaaccctttaccgaaagccaatcacttacactgacagacgtagaaaatctgcatcttccccttcctctgttgcagtcatggatgcaccaaccccaccagccactgccaccaactgtgatgtttcctccacagagtgtgctcagtctcagccagagtaaagtgctccccgtaccccaaaaagccgttccatatccccaacgcgatatgccaatacaggcctttctgctgtaccaagagcctgtcctcggtcccgtgagaggccctttccctatcatcgta

SEQ ID NO: 555 - DNA, 672 bp, synthetic construct
  source 1..672: mol_type = other DNA
atgaaagtgcttatcttggcctgccttgtggccttggctctggctcgtgagcttgaagagctgaacgtgcctggggaaatagttgagagcctttcctcaagcgaagagagtatcactagaattaacaagaaaatcgagaaattccaatcagaagagcaacaacagacagaagatgaactccaggacaagattcatccttttgcacagacacaatcactggtgtatcctttcccaggccctatccctaacagtttgccacaaaacattcccccactcactcagacaccagtcgttgtgccaccatttctgcagcctgaagtcatgggagtcagtaaagtgaaggaagcaatggcacccaaacacaaggaaatgcccttccccaagtaccccgtggagccttttacagaatctcagtcccttaccctgaccgatgttgagaatctgcatcttccacttccactcttgcaaagctggatgcaccaaccacaccaacctcttccacctaccgtaatgtttcctccacagtctgtcctgtctctgtcacaaagtaaagttttgcctgtcccccaaaaggcagtcccctacccacaacgtgatatgccaattcaagcattcttgctttaccaggaaccagtactcggtcctgtgcgtgggcctttccccataattgtg

SEQ ID NO: 556 - DNA, 672 bp, synthetic construct
  source 1..672: mol_type = other DNA
atgaaagtattgatacttgcttgtttggttgcccttgctcttgcccgtgaattggaggagctgaatgttcctggggagattgtcgaatcacttagttcatccgaggagagtatcacccgtataaacaaaaagattgagaagttccagtcagaagaacagcaacagacagaagacgagctgcaggataagattcaccctttcgcacagacccagagtttggtttacccatttcccggacctataccaaatagtcttccccaaaacatacctccactgacccagaccccagtggtagtgccccccttccttcagccagaagtaatgggcgtgtctaaggtaaaggaagcaatggcacctaagcataaggagatgccatttcccaaatatcctgtagaaccatttacagaatctcaatccctcaccctgactgatgttgagaatttgcaccttcctcttcccttgctccagagttggatgcatcagccacaccaaccactccccccaactgtaatgttccccccacaatcagtattgtcactcagccaaagcaaggttctgcccgttccacagaaggctgtgccttacccacagagagacatgcctatccaagccttcttgctttatcaagaacccgtgctcggtcctgtgcgtggccctttccccatcatagtt

SEQ ID NO: 557 - RNA, 672 nt, synthetic construct
  source 1..672: mol_type = other RNA
atgaaggttttgatactcgcctgcttggtcgcccttgctctcgccagggaattggaggaacttaacgtccccggagaaatcgttgagtcccttagctcttctgaggaaagtataacaaggataaacaaaaagattgagaagttccaaagtgaggaacaacaacaaaccgaagatgaactccaagacaagatacatccctttgctcagacacagtccctggtgtatccttttccaggccctataccaaacagcctcccccagaacataccccccttgacacagactcctgtagtagtacctcccttcttgcagcctgaagtgatgggggtttccaaggtcaaggaggccatggctcctaaacataaggaaatgccctttcctaagtatcctgtggaaccatttactgagtcacaaagccttacactgactgacgtggagaacttgcatttgcctctcccccttcttcagagttggatgcaccaacctcaccaaccccttccacctaccgtaatgtttcctcctcaatctgtattgtccctgtcacagtctaaagttctccccgtcccacagaaggccgtcccttaccctcaacgtgatatgccaatacaagctttcctcctctaccaggagccagtgcttggaccagtccgcgggccatttccaataatcgtt

SEQ ID NO: 558 - DNA, 672 bp, synthetic construct
  source 1..672: mol_type = other DNA
atgaaagtgttgatcttggcctgtctcgtagccctggcactggcacgtgagctggaagaattgaacgtccccggagagatcgtcgagtcactgtctagctcagaagagtcaatcacacgtattaacaagaaaatcgaaaaatttcagtccgaggaacaacaacagaccgaggatgaattgcaggataaaattcatcccttcgctcagacccaatctctcgtctatcccttccccggtcccatccctaactcactcccccagaacatcccacccctgacacagacacccgttgtagtaccaccatttctccagcctgaggtgatgggagtatcaaaggtaaaggaggccatggctcccaagcataaagagatgccttttcccaaataccctgtagagcccttcacagaatcccagtctcttacactgaccgacgttgagaatttgcatctgccactgcctctgttgcaaagttggatgcaccagccccaccagcctttgcctcccaccgtcatgtttcctccccagtccgttctgtctctctcacaatccaaggtccttcccgttccacaaaaagctgttccatatccacagcgcgacatgccaattcaggctttccttctctatcaagagcctgtacttggaccagtcagggggccatttcccattatcgtc

SEQ ID NO: 559 - DNA, 672 bp, synthetic construct
  source 1..672: mol_type = other DNA
atgaaagttttgatccttgcatgtctcgtagcattggctctcgcacgcgagcttgaagagttgaatgttcccggtgaaattgtggagtccctttcctccagcgaagaatccatcactcgtattaacaagaagatcgaaaagtttcaatcagaggaacagcagcagacagaggatgaacttcaggataagattcaccctttcgctcaaacccaatctctggtgtatccctttccaggtcccattcctaattccctgcctcagaacattcccccccttacacaaacccctgtggttgtaccaccatttctgcaacctgaggttatgggtgtttccaaagttaaggaagccatggcacctaaacacaaagaaatgccttttccaaaataccctgtggagcccttcactgagtcacagtcccttacccttacagatgttgagaatttgcaccttcctctgccccttctccagagctggatgcaccagccacaccagcccctccctcctactgttatgtttcctcctcagtccgtgctttccctttctcaaagcaaagttctccccgtacctcaaaaggctgtgccatatccacaacgtgatatgcccatacaagccttcctgctctaccaagaacctgtactcggacccgtcaggggtccctttccaattatagtc

SEQ ID NO: 560 - DNA, 672 bp, synthetic construct
  source 1..672: mol_type = other DNA
atgaaagttctgattcttgcatgtcttgtagcactcgcccttgcacgcgagttggaagaattgaacgtacccggagagatcgttgagtctctctccagttctgaagagtctataacccgcatcaataagaaaatagaaaagtttcaatctgaagaacagcaacaaacagaggatgagctccaggataagattcatcctttcgcccagacacagagcctcgtctaccctttccctggaccaattcctaactcccttccacagaacataccccctcttacccaaactcctgtagttgtcccaccattcttgcagccagaagtaatgggagttagcaaagtaaaggaagcaatggcccctaaacataaggagatgccattccctaagtaccccgttgaaccattcactgagagtcaatcactgacactcacagacgtagaaaatctccatttgcccctgcctctgttgcaaagttggatgcaccaaccccaccagcccttgccacctactgtcatgtttccccctcaaagtgtactttcattgtcacaatctaaggtattgcctgtgcctcagaaagcagtaccatacccccaacgcgacatgccaattcaggcatttctgctttatcaggagccagtccttggaccagtacgtggtcccttccctattattgtg

SEQ ID NO: 561 - DNA, 672 bp, synthetic construct
  source 1..672: mol_type = other DNA
atgaaagtgctgattctcgcctgtcttgtggcccttgcacttgctcgtgaattggaggaactgaacgtcccaggcgaaatagtagaatccctgtcatcttcagaagaatcaataacccgtataaacaagaaaatagagaagttccagtccgaagagcaacaacagactgaagacgaactgcaagacaaaatacatccattcgctcaaactcaaagcctcgtgtacccctttcccggccctatacccaatagccttccccaaaacatacctcctctcacacagacacccgttgtcgttccaccattcctgcaaccagaggtgatgggggtaagtaaggttaaggaagctatggcccccaaacataaggagatgccttttccaaaatacccagtagagccctttacagaatctcagagtctcacattgacagacgtggagaatttgcacttgcctcttcccctccttcaatcatggatgcaccaaccacaccaacccctgcctcctaccgtaatgtttcctcctcaaagcgtactcagtttgtctcaatctaaagtgctccccgttcctcaaaaagcagtcccctatcctcaaagagacatgcccattcaagcctttcttctgtaccaggaaccagtcctggggcccgttagaggtccctttcctattattgtc

SEQ ID NO: 562 - DNA, 672 bp, synthetic construct
  source 1..672: mol_type = other DNA
atgaaagtacttatactggcttgcttggttgctcttgcactcgcaagagaattggaagaactcaatgtgcctggagaaattgtggaatctttgagttcctctgaggagagcattactaggatcaacaaaaaaattgagaagtttcaatctgaagagcagcagcaaaccgaagacgaattgcaggacaagattcaccccttcgcacagacacaatctcttgtatacccattcccagggccaattcctaactcactcccccagaacataccaccccttacccagaccccagtagtggtgccacccttccttcagcccgaagtgatgggggtgtcaaaagttaaagaagcaatggccccaaaacataaagaaatgccctttcctaagtatcctgtcgaaccttttacagagagccaatccttgactctcactgacgtggaaaatttgcatcttccccttcctctcctccaatcatggatgcaccaacctcaccagccccttccacccactgtaatgttcccacctcagtcagtcctgagcctgtcacagagcaaggtgctccctgtcccacaaaaggccgtaccctatcctcagagggacatgccaattcaagcctttcttctctaccaggaacccgtgcttggtccagtcagaggcccattccctattattgta

SEQ ID NO: 563 - DNA, 672 bp, synthetic construct
  source 1..672: mol_type = other DNA
atgaaagtcctcatcttggcatgtctcgtagcacttgctcttgccagagaacttgaagagctgaacgtacctggtgaaatcgttgagtcactcagctcatccgaggagtccataacaaggataaacaaaaaaattgagaagttccagagtgaagagcaacagcagaccgaggatgaacttcaggataagatccatcccttcgcccaaacccagtcattggtttatcctttccctgggcccatacccaactctctgcctcagaatatcccccctcttacccaaacaccagtcgtggtcccacccttcctccagcctgaagttatgggcgtaagcaaggtcaaggaagctatggctccaaaacacaaagaaatgccctttccaaagtaccccgtggagccctttactgaatctcaaagcctgactctgacagacgtagagaacttgcatttgcccttgcccctcctccaaagttggatgcaccagcctcatcagccattgccccctactgtgatgttcccaccccagtctgtattgtcattgagtcaaagcaaggttcttcccgttccccagaaggccgttccctatcctcagcgtgatatgcccatccaagcctttcttctgtatcaggagcctgtgcttggccctgtgagagggccctttcccatcatcgtg

SEQ ID NO: 564 - DNA, 672 bp, synthetic construct
  source 1..672: mol_type = other DNA
atgaaggtacttatccttgcttgccttgtggctcttgccttggccagggagttggaagaactcaacgtgcctggcgagatagtcgagtcattgagtagctctgaagaatcaattacccgtatcaataaaaagatagaaaaattccaatctgaagagcaacaacagaccgaagacgagctgcaagataagatacatccatttgcccaaacacagtccttggtctacccatttcccggacctattcctaattccttgccccaaaacatccctcctttgacccaaacacctgtggtagttccaccttttctccagcctgaggttatgggtgtgagtaaggtcaaggaggctatggcaccaaagcataaggaaatgccttttcccaagtatccagttgaacccttcaccgagtcccagtcactcaccttgacagatgtggaaaacttgcatttgcctctgccactgttgcagagctggatgcaccagccccatcagcctctccctcctacagtaatgttccctccccagagcgtactttcccttagtcaaagcaaagtcttgcccgttccacaaaaagccgttccataccctcaacgcgacatgcccatacaagcattcctcttgtaccaagaacctgtccttggtcctgtccgtggtcctttccccattatagtt

SEQ ID NO: 565 - DNA, 672 bp, synthetic construct
  source 1..672: mol_type = other DNA
atgaaagttttgatactcgcctgcctggtggctctcgccctggctagagagcttgaagagcttaacgttcctggcgagatcgttgagtctctgtctagctctgaagagtctattactaggatcaacaaaaagatagagaaattccagtctgaagagcagcaacaaactgaggacgagcttcaagacaagatacaccccttcgcccaaacacaatcactggtttatccttttccaggtcctatccccaattcacttccccagaacatacctcctttgacacaaactcccgtagttgtacccccctttcttcaacctgaggttatgggggtgtcaaaagtgaaagaagcaatggcccccaaacataaagagatgcctttccccaaatacccagttgaaccctttactgaaagtcagtcattgaccctgaccgacgtagaaaacctccacctcccacttcctcttttgcagtcttggatgcatcagccacaccagcctcttcctcccacagtaatgtttccaccacagtccgttttgtccctgagccaatctaaggtacttcccgtccctcaaaaggccgtaccctatcctcaaagggatatgcctatacaagcattccttttgtaccaagagcccgtattgggaccagtacgtggtcccttcccaatcatagtt

SEQ ID NO: 566 - DNA, 672 bp, synthetic construct
  source 1..672: mol_type = other DNA
atgaaggtgcttattcttgcatgtctcgttgccctcgccctcgctcgtgagttggaggagttgaatgtcccaggtgaaatagtcgagtccctttcctcatcagaagagtccatcacaagaataaataaaaagatagagaagttccaatcagaagagcagcaacagactgaggacgagctgcaagacaagattcacccatttgcccaaacacaatctctggtctatcctttcccagggccaatacctaatagtcttcctcagaatattcctcccctcacccagacacctgttgtggttccaccattccttcagcctgaagttatgggtgtatcaaaggttaaggaagctatggcacccaaacacaaggaaatgcccttcccaaagtatcccgttgaaccatttactgagtctcagtcccttactcttaccgatgtagagaatctccaccttcctttgccattgctgcaatcatggatgcaccagccccaccagcccctgccacccaccgttatgttccctccccagtccgtgctgtctctttctcagtccaaagtcctccccgtgccacaaaaagctgtgccttatcctcaaagagacatgcctatacaggcattcttgttgtaccaggaaccagtgctggggccagtaaggggcccctttcctattattgtc

SEQ ID NO: 567 - DNA, 672 bp, synthetic construct
  source 1..672: mol_type = other DNA
atgaaagtgttgatattggcttgtctggtggctctggccctggctagggaactcgaagagctgaatgttcccggagagatagttgagtcactctccagttcagaagagtccatcactcgcattaacaagaaaatcgagaaatttcaatcagaagaacaacagcaaaccgaggacgaacttcaggataagatccacccctttgcccagactcagagcctcgtctaccctttccctggtccaatacctaacagtcttccacaaaatatacctcctctgactcagactcccgtggtcgttcccccattcctccaaccagaggtcatgggagtatctaaggttaaagaagcaatggccccaaagcacaaggagatgcctttcccaaaatatccagttgagcccttcaccgagtcccagtctctcaccttgaccgatgtagagaacttgcacctgccactccctctgttgcaatcatggatgcaccagcctcatcagccccttccaccaaccgtgatgttcccaccccagtctgttctcagtctctctcaaagcaaagtattgcccgttccacagaaagcagtaccatacccacagagggatatgcctattcaggcattcctgctttatcaagaacctgtcttgggaccagtaagagggccatttccaatcattgtg

SEQ ID NO: 568 - DNA, 672 bp, synthetic construct
  source 1..672: mol_type = other DNA
atgaaggtccttattttggcttgtctggtcgccttggccttggcccgtgaacttgaggagctgaatgtgcctggtgagatagtagagtccctgagcagcagtgaggaatctatcaccagaataaacaagaagattgaaaaattccagtccgaggaacaacagcaaacagaagatgagttgcaggataaaatccacccctttgctcaaactcagagccttgtgtaccctttccctgggccaattcccaattctctgccacaaaatatccctccactcacccaaacccccgtagttgtgcctccatttctccagcccgaggttatgggtgtaagcaaggtcaaggaagccatggccccaaagcacaaggagatgccctttcccaaataccccgttgagccattcaccgagtcacagtctctgactctcaccgacgtggaaaacttgcacctgccacttccacttctccaaagttggatgcaccagccacatcaaccccttccacccacagtaatgttcccaccacaaagcgtccttagcttgtctcagagtaaagtgctgcctgtcccccaaaaagccgtcccttatccccaaagggacatgcctattcaggcttttctgctctaccaggagccagtcctcggtccagtgcgtggacctttccctataattgtt

SEQ ID NO: 569 - DNA, 672 bp, synthetic construct
  source 1..672: mol_type = other DNA
atgaaagtactgatcctggcttgcttggttgcactggccttggctcgtgagctggaagaacttaatgtccctggtgagattgtggagagtttgtcttcttcagaggaaagcattactcgtatcaataaaaagattgagaaatttcaatcagaagagcagcaacaaactgaagacgagctccaggacaaaatacacccattcgcacagacccagagcctggtctacccctttcctggacccatacccaattccctcccacaaaacattccacctttgacacaaactcccgtcgtggtcccccccttcctccagccagaagtaatgggtgtcagcaaggtcaaagaagcaatggcacctaagcataaagaaatgccatttccaaagtatcctgttgaaccatttaccgaatcacaaagcttgacacttacagatgtcgagaacctccatctccctcttcctcttttgcaatcttggatgcatcagccacaccaaccactgccccctactgtaatgtttccaccccagtctgttctgtccctcagtcagagcaaagtactgcccgttccccagaaggccgtgccatatccccaaagggatatgcctatccaagcatttctgctctatcaagaacccgttctgggtccagttcgtggcccattccccatcattgtg

SEQ ID NO: 570 - DNA, 672 bp, synthetic construct
  source 1..672: mol_type = other DNA
atgaaagtcttgatacttgcatgtttggtcgctttggctcttgcccgcgaactggaagagctgaacgtacctggtgaaatagttgaatcactgtcatcttccgaagaaagtataactaggatcaacaaaaaaattgagaagttccaatctgaggagcaacaacaaacagaggatgagttgcaggacaaaattcacccctttgcccaaacacaaagtctcgtctatcctttccctggacccattcccaactcactcccacaaaacattccaccattgacccagacccccgtagtcgtacctccttttctgcaacccgaggtaatgggggtaagtaaagttaaggaagccatggcaccaaagcacaaagagatgcctttcccaaaatacccagtcgaaccattcaccgagagccagtccctgacactgaccgatgtagagaatctgcatcttccattgcctctcctccagtcctggatgcaccaaccccaccaaccactccctcctacagttatgttccccccacagagcgtcctcagtctcagtcagtccaaggttcttcccgtaccacaaaaagcagtgccatacccacaaagggacatgcctattcaggcttttttgctctatcaggagcccgtactgggtcctgtcaggggtccttttcccatcatagtt

SEQ ID NO: 571 - DNA, 672 bp, synthetic construct
  source 1..672: mol_type = other DNA
atgaaggtattgatcttggcctgtctggttgccttggctttggctcgtgaacttgaagagttgaacgtacctggcgaaattgtagaaagcctgtccagcagcgaagaatccataacaaggatcaataaaaagattgaaaagtttcagagtgaagagcagcaacagacagaggacgagcttcaagacaagattcatccttttgctcaaacccaatcactcgtatatccttttcccggaccaattccaaattcactccctcagaacataccacccctgactcaaactcccgttgtcgtcccccccttccttcagccagaggttatgggagtctctaaagtcaaggaggccatggcccctaagcacaaagaaatgccctttcctaagtacccagttgaaccttttaccgaatcccagagtctgactctgacagatgtggaaaatctgcatttgcccttgccactcttgcagagttggatgcatcagccccaccagcctctccccccaacagtaatgtttcctccacaaagtgtgctgtcactgagccaaagtaaagtcctgcctgtgccacagaaggctgtcccttatccacagcgcgatatgcctatccaagcatttctgctttaccaggagccagtacttgggccagtgagaggtccctttccaatcatagtc

SEQ ID NO: 572 - DNA, 672 bp, synthetic construct
  source 1..672: mol_type = other DNA
atgaaggtactcatcttggcctgtctcgtcgcactcgccctcgcccgcgaactcgaggagctcaatgttccaggagaaatagtggagtcactgtctagctcagaagagagcattacccgcatcaataaaaagattgagaagtttcagtccgaggagcaacagcaaaccgaggatgagcttcaggacaagattcacccattcgcacaaacccaatctctggtctatcctttccctggaccaataccaaactccttgcctcagaatataccacccttgacacaaactcccgtagtggtgcccccctttcttcagccagaggtcatgggcgtttcaaaagtgaaggaggctatggctcccaaacataaagagatgcctttcccaaaatatcctgtggaaccctttacagagtcccagagcctcacactcactgacgttgaaaatttgcacttgcccctgccactcttgcaatcctggatgcaccaacctcaccaaccattgccccccacagtaatgtttcctcctcaaagcgtgctgagtctgagtcaatccaaggtgctcccagtgcctcagaaggctgtaccttaccctcagcgcgatatgcctattcaggctttcttgctctatcaagagccagtcctcgggcctgtacgtgggcctttcccaatcatagta

SEQ ID NO: 573 - DNA, 672 bp, synthetic construct
  source 1..672: mol_type = other DNA
atgaaggttttgatcttggcttgcctcgtggcattggcccttgcccgcgagttggaagaactcaacgttcctggcgagatagtagaaagcctttcaagctcagaagaatcaattaccagaatcaataaaaaaatcgaaaagttccagagcgaagagcaacaacagaccgaagacgagctgcaagataaaatccatccatttgcacagacacaatccctcgtttacccattcccaggcccaatcccaaattctctcccacaaaacatcccacctctcacacagacccctgtggtggtgcctcccttcctgcaaccagaggtaatgggagtgtcaaaagttaaggaggccatggcacctaaacataaagaaatgccattccccaaatatccagtggaaccttttaccgagtcccagagtctcacccttacagatgttgaaaatttgcatctgcctctgcctctccttcagtcctggatgcatcagcctcaccagcctctgcccccaactgtcatgttcccccctcaaagcgttctgtctctttcccagtccaaggtgctccctgtccctcagaaggctgtgccttacccacaacgcgatatgcctatacaagcattcctcctgtaccaagaacccgtgttggggcctgtgcgtggtccttttcccattatcgtg

SEQ ID NO: 574 - DNA, 672 bp, synthetic construct
  source 1..672: mol_type = other DNA
atgaaagtccttattctggcctgtcttgtagctctggctctggctcgtgagcttgaagagcttaacgtaccaggtgaaattgttgaatcacttagttcctctgaagaatcaataacccgtattaacaaaaaaatcgagaaattccagtctgaagagcaacagcagactgaggatgagctccaggacaaaatacacccatttgctcagactcaaagtcttgtatatcctttccctggacccataccaaactcactgccacagaacatccctcctcttactcaaaccccagttgttgtacctccattccttcagcccgaggtcatgggtgtgtccaaagttaaagaggctatggctcccaagcacaaggaaatgccctttccaaaatacccagtagagccatttacagaatcccagagtcttaccttgacagatgtagagaatttgcatctgccactgcctctccttcaatcttggatgcaccaaccccatcagccactgcctcccacagtaatgtttccaccccaatccgtcttgtcattgagccaatccaaagttctgcctgtaccccaaaaagccgtgccctacccccagcgcgacatgccaattcaggcatttttgttgtaccaagagcctgtattgggtcccgttaggggcccattcccaattattgtt

SEQ ID NO: 575 - DNA, 672 bp, synthetic construct
  source 1..672: mol_type = other DNA
atgaaggtactgattctggcttgcttggtagcattggcactcgctagagaactggaggaacttaacgtgccaggagaaatcgtagagagtttgagctcatctgaagagtccattacaagaataaataagaaaatcgaaaagttccaatccgaggaacagcagcagaccgaagatgagctccaagataagatccatccatttgcacagacacagtctctcgtgtatccctttcccggacctattccaaattcactgccacaaaacattcctccacttactcagacaccagtggtcgttcccccctttttgcagcccgaggtcatgggagtttccaaggttaaagaggctatggcccccaagcataaagaaatgccttttcccaaataccccgtggagccctttactgaatctcagtcccttaccctgactgatgtcgaaaacttgcatctccccttgccccttctccaaagctggatgcaccagccccatcaacccctcccacccacagtcatgtttccaccccaatcagtgcttagcctgtcccaatccaaggttctgcccgtcccccaaaaggctgttccctatccccagcgcgatatgcccattcaggcattcttgctgtatcaggaacccgtactggggcctgtgaggggacctttccccataatagtg

SEQ ID NO: 576 - DNA, 672 bp, synthetic construct
  source 1..672: mol_type = other DNA
atgaaagtattgattctcgcttgccttgtggctttggcccttgccagggagcttgaggaactgaacgtcccaggagaaatagtcgaaagtctctcctcttcagaagaaagcataactcgtataaacaagaagatcgagaagtttcagtcagaagagcagcagcagacagaagatgaactccaggacaaaatccacccctttgcacaaacacaaagtcttgtatatccttttcctggaccaattcccaacagtctgccccagaatatcccaccactcacccaaactcctgtagtagtacccccattcctgcaacctgaagtaatgggcgtctcaaaagtgaaagaggcaatggctccaaaacacaaggaaatgcctttccctaaataccctgttgaaccttttaccgagtctcaaagtttgaccctcacagatgttgagaatctgcacctccctctgccactgctccaatcctggatgcatcaacctcatcagcctctgccacccaccgttatgttcccacctcagtccgtgctgagtttgtcccaaagcaaggtattgcctgtgccccagaaagctgtaccttatccccaacgcgacatgcccattcaagccttccttctctatcaagaacccgtcttggggcccgttagaggtcccttccccattattgtg

SEQ ID NO: 577 - DNA, 672 bp, synthetic construct
  source 1..672: mol_type = other DNA
atgaaagtactcatcctggcttgcctcgtggctcttgcactggcaagagagttggaagagcttaatgtgcccggcgagatagttgaatccctctcctcaagtgaggagtctataaccagaattaacaaaaaaattgagaaatttcagtctgaggagcaacaacaaactgaagatgaactccaagataaaattcacccattcgcccagacccaatctctcgtgtatccattcccaggccccattccaaactctctcccccaaaacattccccctctgacacaaactcctgttgtcgtgccacccttcttgcagcctgaggtgatgggggtatccaaagtcaaggaagccatggcaccaaaacataaagagatgccctttccaaagtatccagtggaaccttttactgaaagccaatctctgacattgactgatgtggaaaatttgcacttgccactccctttgcttcagtcctggatgcaccaaccccaccagccattgccaccaaccgtgatgttcccaccacaaagcgtattgagtctcagtcaaagtaaagtactgcctgtaccccaaaaagcagtgccttacccacagagggacatgccaattcaggcatttcttctttaccaggaacctgttctcggacctgtgagagggcccttccctataatcgtc

SEQ ID NO: 578 - DNA, 672 bp, synthetic construct
  source 1..672: mol_type = other DNA
atgaaagtactcattctcgcatgcctcgtggccctcgccttggctcgtgaactcgaggaacttaacgtacccggagaaatcgtagaaagtctgtccagttccgaagaaagcataaccagaataaataaaaagatcgaaaagttccaaagtgaggaacaacagcaaactgaggacgaactgcaagacaaaatacacccttttgcacaaacacagtcactggtgtacccctttccaggtcccattcccaacagtctgccccaaaacattcccccactgacacagactcctgtagtagtcccaccttttctccagcccgaagttatgggtgtctctaaggtcaaagaggctatggcccccaaacacaaggaaatgcctttccctaagtatccagtagaacccttcaccgagtctcagagcttgaccctgacagacgtagaaaatctccacctgcctcttcccctgctccagagctggatgcaccaaccccatcagccactgccacccaccgtaatgttccccccacagagcgtcttgtcactgtcccaatctaaggttctgcctgtaccacagaaagccgtgccctacccccaacgtgatatgccaatccaggctttcttgctttatcaagagcctgtccttggcccagttcgcggacccttccccatcattgtt

SEQ ID NO: 579 - DNA, 672 bp, synthetic construct
  source 1..672: mol_type = other DNA
atgaaagtgctgatattggcctgcctggtagccctcgcactggctagggagcttgaggaattgaacgtgcctggggaaatagtcgagtctctcagctccagcgaagaatccataacccgtattaacaaaaagattgagaaatttcagtccgaggagcaacaacagactgaggatgagctgcaggataaaatacatccctttgcccagacccaaagccttgtttatccattccccggacccatcccaaactcacttccccagaatataccccccttgacccaaacccctgtagtggttccacccttcctgcaaccagaagtaatgggagtgagtaaagttaaagaagctatggcaccaaaacataaagagatgcctttccccaaatatcctgtagaacccttcactgagtcacagagccttaccttgactgacgttgaaaatcttcacctcccccttcccctccttcaaagctggatgcaccaaccccaccagccattgcccccaaccgtgatgttccccccacagagcgtgttgtcactttcccagtctaaagtgctcccagttccacaaaaagccgtaccttatccccaaagggatatgcctatacaagcattcctgttgtatcaggaaccagtccttggccctgttcgcggtccattccctataatagta

SEQ ID NO: 580 - DNA, 672 bp, synthetic construct
  source 1..672: mol_type = other DNA
atgaaagttctcatacttgcatgcctggtcgctctcgcattggcccgtgaactggaggagttgaatgtccctggagagatcgtggagagtctctcctcctcagaggagtccatcactagaatcaacaaaaaaattgaaaaatttcaatcagaagaacagcagcagacagaggacgagcttcaggataaaattcacccctttgctcagactcaaagcctcgtatatccttttcccggacccattcctaattcccttccacagaacatccctcccctcacccaaacaccagttgtcgtaccaccctttctccagcctgaggtcatgggtgtctcaaaggtcaaagaggcaatggcacctaaacataaggagatgccatttcccaaataccccgtggagcctttcaccgagtcccagtcactcacccttacagacgtagagaacttgcatctgccactcccacttttgcagtcctggatgcaccagcctcatcagcctctcccccctacagttatgtttcctccacagagcgtactgagcctgtcccagtcaaaagttctccctgtacctcaaaaggcagttccatacccacagcgcgacatgcccatacaggctttcttgctctatcaagaacccgtccttggccctgttcgcggtccattcccaataatagtg

SEQ ID NO: 581 - DNA, 672 bp, synthetic construct
  source 1..672: mol_type = other DNA
atgaaggttttgatcctggcttgtcttgtggccttggcactcgctcgtgagcttgaggagcttaatgttccaggcgagatagtcgaaagtttgtcttccagcgaggagtctataacacgtatcaacaaaaaaatagagaagttccagagcgaggaacaacagcagactgaagacgagctgcaagacaagatccatcccttcgcacagacacagtccctcgtttatcctttccctggcccaatccccaactcactcccccagaacattccaccattgactcagacacccgtagtggtccctcctttccttcaaccagaagtcatgggcgtcagtaaagttaaggaagcaatggcccccaagcacaaggaaatgccttttccaaaataccctgtggaaccattcacagaaagtcagagcttgactttgactgatgtagagaatctgcatcttcccctgccactccttcaatcctggatgcatcagccccaccagcctctccctccaaccgttatgtttcctccacagtccgttctgtcattgtctcagtccaaagttttgccagttccacaaaaagccgtcccatacccacagagggatatgcctatccaagcttttctgctgtatcaggagcctgtcctcggccctgttaggggacctttccccattattgtg

SEQ ID NO: 582 - DNA, 672 bp, synthetic construct
  source 1..672: mol_type = other DNA
atgaaggtattgattcttgcatgtctcgtagcacttgctctcgcaagggaactggaggagctgaatgtacctggcgaaattgtcgaatctcttagtagctccgaagaaagtattacacgtataaacaagaagatagaaaaattccaaagcgaagaacagcaacagaccgaggacgagctgcaagacaagatccacccctttgcacaaacacagagcttggtgtacccttttcccggtccaataccaaattcactccctcagaacatccctccacttacccagacacctgtcgtcgttcccccttttctccagccagaggtcatgggtgtcagtaaagtgaaggaggcaatggcccccaaacataaagaaatgcccttccctaaataccccgtcgagccctttacagagagccaaagcctgactttgactgacgtcgagaacctgcacctgccactgcccttgctgcaaagctggatgcaccagccccaccaacctctgccccctacagttatgtttcccccccagagtgtgttgtcactgagccaatctaaagtcctccccgtgccacaaaaagcagtgccctatccacagcgcgacatgcctatccaagcatttcttctttaccaggaacctgtgcttgggcctgttcgcggcccctttcctatcatagtg

SEQ ID NO: 583 - DNA, 672 bp, synthetic construct
  source 1..672: mol_type = other DNA
atgaaagtccttatcttggcttgcctcgtagccttggcactcgcacgcgaacttgaggagcttaacgtacctggagagatcgtggaatctcttagctccagcgaggaatccatcactaggattaacaagaaaatcgaaaaattccaaagtgaggagcaacaacagacagaagacgaactgcaagacaaaatccaccctttcgcacagactcaaagtcttgtttaccctttccctggccccatccccaatagtttgcctcagaatatacctccactgacacaaacaccagtggtcgtaccaccattcctccaacctgaagtcatgggcgtatctaaagttaaggaagctatggcccctaagcataaagaaatgcccttccctaaataccctgtagagccatttacagaatctcaatcccttacattgacagatgttgagaaccttcaccttcctttgccattgcttcagtcttggatgcaccaaccccaccaacctcttcctcccaccgtgatgtttcctccccagtctgttttgtcccttagtcagagcaaagttttgcctgtgcctcagaaagctgtaccctatccccagagggatatgccaatacaagcctttctgctttaccaagaacccgtattgggacctgttcgcgggcctttccccataatagtg

SEQ ID NO: 584 - DNA, 672 bp, synthetic construct
  source 1..672: mol_type = other DNA
atgaaggttttgatactcgcatgtcttgtcgctttggctctcgcccgtgaactggaagaattgaatgtcccaggtgagatagtagaatccctgagcagtagcgaggaaagtatcacaagaataaacaagaagatagaaaaattccaaagtgaagagcagcagcaaaccgaggacgaattgcaggacaaaatccaccctttcgctcagacccagtctctcgtttatccctttccaggccctatacctaacagcctccctcagaacatccccccacttacacaaacacccgttgtggtcccaccattccttcaacccgaagtgatgggagtctccaaggttaaagaggctatggcccctaagcataaagagatgcctttcccaaagtacccagtcgagccctttaccgaatctcaatctctcaccttgaccgacgtggaaaacctccatttgcccttgccacttcttcagtcttggatgcaccaaccccatcagcccctcccacccaccgtcatgtttcccccacagagcgttctctcacttagccaatctaaggtattgccagtcccccaaaaagccgtaccttatcctcaaagagatatgcccattcaggcctttctcctctatcaggaaccagtgcttggacctgtgcgtgggccctttccaataattgtc

SEQ ID NO: 585 - DNA, 672 bp, synthetic construct
  source 1..672: mol_type = other DNA
atgaaggtgctcatccttgcctgcctggttgccttggccctggctagagaactcgaagagctgaacgtcccaggtgaaattgtggaatccctttctagttcagaagagtcaataacaagaataaacaagaagattgaaaaatttcagtcagaggagcagcaacagaccgaggacgaattgcaggataaaattcaccccttcgcacagactcagtcccttgtttacccttttcctggccctatccccaatagcctgccacaaaatatcccacctttgacccagactccagtagttgtgccaccattcctccagccagaagtgatgggcgtgagtaaagttaaagaagctatggccccaaagcataaggaaatgccttttccaaagtaccctgtggagccctttaccgaatctcagtccctgactctgaccgatgtagagaatctgcaccttcctcttccccttcttcaaagctggatgcatcaacctcaccaacctctgccacctactgtcatgttcccaccacaatccgtgctgtcattgtctcagtcaaaagttcttcctgtacctcagaaggcagttccttatccccaaagggatatgcctattcaggcttttctcctgtatcaggagcccgttttgggacccgtcagaggaccattcccaataattgtg

SEQ ID NO: 586 - DNA, 672 bp, synthetic construct
  source 1..672: mol_type = other DNA
atgaaggtattgatccttgcctgccttgtagctctcgcacttgcaagggaactggaggaacttaacgtaccaggagagattgtggagagtctctcctcctctgaagagtctattactaggattaacaagaaaatagaaaagtttcagagtgaagagcaacagcaaaccgaagatgaattgcaggataaaatccatcccttcgcacagactcaatctctggtctatccatttcctgggcctatccctaactctttgcctcaaaacataccacctctgactcagacacccgtagtcgtgcctccttttcttcagcctgaagtcatgggcgtctccaaggtgaaggaagccatggcccctaagcataaggaaatgcccttccctaagtatcctgtggagcccttcaccgaatctcagagtcttacactcactgatgtagagaatctgcacctccctcttccattgctccaaagttggatgcaccaaccacatcagcctctgccaccaacagtcatgttccctccccagagtgtacttagcctttctcaaagtaaggtattgcctgtgcctcagaaagcagtaccttacccccaacgtgatatgccaatacaagcctttttgctttaccaggaacctgtcctcggccccgttcgcggaccattccccattatcgtc

SEQ ID NO: 587 - DNA, 672 bp, synthetic construct
  source 1..672: mol_type = other DNA
atgaaggtcttgattttggcttgtcttgttgctttggcccttgctagggagctggaggagcttaatgtgcccggagaaattgtcgagtcactctcaagctccgaagaatctatcacccgtatcaacaagaagatcgagaagttccagagcgaggaacagcagcaaaccgaggacgaactgcaagacaagatacaccctttcgcacaaacccaatcactggtttacccatttcctggtccaattccaaacagtctccctcagaacatcccacccttgactcaaacacccgttgtggtaccacctttcttgcaaccagaagtcatgggggtgtcaaaagttaaagaggcaatggccccaaagcataaagagatgcctttccctaaataccctgtggaaccattcactgaatcacagtctcttacattgaccgacgtagaaaatctccatctgcccttgcccttgcttcagtcttggatgcaccaaccccaccagcctttgcctcctacagtcatgtttccacctcagtctgtcctgagccttagtcaatcaaaagttctgcctgtaccccagaaggcagtaccatacccacagcgcgacatgcccattcaagcatttctcctgtaccaggaacccgttctggggcccgttcgtggcccctttcctattatcgtc

SEQ ID NO: 588 - DNA, 672 bp, synthetic construct
  source 1..672: mol_type = other DNA
atgaaggttcttatcctcgcttgtttggtagctttggccctggcccgtgaactggaagaacttaatgttcctggcgagatcgttgaatccctgagcagttctgaggagtcaataaccagaatcaacaagaagatagaaaaattccagagcgaggagcagcaacaaacagaagacgagctgcaagataagatacatccattcgcccaaacccaatcactggtgtaccctttccccggtcctatacccaactcactgccccaaaacattcctcctctcacacaaaccccagtcgtcgttccaccctttttgcagcccgaagttatgggcgtatccaaggtgaaggaagcaatggcccccaagcataaggagatgccattccccaaatatcctgtcgaaccctttacagagtcacagagtctcaccctgaccgatgtagagaatcttcacttgcccctcccccttttgcagtcctggatgcatcaaccacaccaacctcttccccctaccgtgatgttccctccacaatcagttttgtcactgtcccagagtaaagttctgccagtcccccagaaggccgtaccatatccacagagggatatgcctatacaagcatttttgttgtatcaggaaccagttcttggaccagtccgtggaccatttcccataatcgtt

SEQ ID NO: 589 - DNA, 672 bp, synthetic construct
  source 1..672: mol_type = other DNA
atgaaagtgttgattctcgcatgtctcgtggccctggcactggcccgtgagctggaagaattgaacgtacccggagagatagtggaatctctttcaagttccgaggagagtataactaggatcaacaagaagatagaaaagttccagtctgaggaacaacaacaaacagaagatgaattgcaggataagatccatccatttgctcagactcaaagtctggtttacccctttcccggacccatccctaatagcttgccacagaatattcctccattgacacagacccctgtggtagtcccaccttttcttcagcctgaggtcatgggcgtgtctaaggtgaaggaagcaatggctcctaaacacaaagagatgcccttccctaagtatccagtggagcccttcaccgagtctcagagcttgactctcaccgacgttgaaaatcttcaccttcctttgccccttctgcaaagttggatgcatcagccacatcagcccctcccacccacagttatgtttcctccacagagcgtactctcactcagtcagtccaaggtgcttcccgtaccccagaaggcagtaccttacccacagcgcgacatgcccattcaggcattccttctttatcaagaacctgttcttggtcccgtaagagggccattccccatcattgtt

SEQ ID NO: 590 - DNA, 672 bp, synthetic construct
  source 1..672: mol_type = other DNA
atgaaggtactgatactggcttgtctggtggccctggccctcgctcgcgagctcgaagagcttaatgtgccaggagagattgtcgaatccttgtcctcttcagaggagagcatcacaaggatcaataagaagatagaaaagtttcaaagcgaagaacagcagcaaacagaggatgagcttcaggataaaatccatccattcgcacagacacaatctcttgtctatccatttcctgggcccatccccaattccctgcctcaaaatataccacccctcacccagacacctgtcgtagttccaccattcttgcagcccgaagttatgggggtatctaaagttaaagaggctatggctccaaaacataaggagatgccatttcctaagtatcccgtagaacctttcacagagagtcagagtctcactcttacagacgtggaaaaccttcacttgcctttgccattgcttcaatcttggatgcaccaaccacaccagcctctgccaccaacagtaatgtttcccccccagtctgtactgtctttgagtcaatccaaagtcttgcccgtaccacaaaaggccgtcccttacccccagcgtgacatgccaatacaggcttttctgctctaccaggagcctgtgctcggccccgtaagaggccctttccccataattgtt

SEQ ID NO: 591 - DNA, 672 bp, synthetic construct
  source 1..672: mol_type = other DNA
atgaaagtcctcatattggcttgcctggtggctctcgcacttgcacgcgagctggaagaactcaatgtccccggtgagatagttgagtccctttcatcctctgaagagagcatcactcgcataaataagaagattgaaaagtttcagtcagaagagcagcaacagaccgaagacgaacttcaagataagatccatccctttgcacaaactcagtctctcgtgtatcctttcccaggccctatccccaactctttgccacagaatattcctccacttacccaaacaccagtggttgtacctcccttccttcagccagaggttatgggagtctctaaagttaaggaagcaatggcccctaaacataaggaaatgccattccctaagtatcccgtagagccctttactgagagccagagtttgacactcaccgatgttgagaatctccacctgcccttgcctctgcttcagtcatggatgcaccagccccatcaaccccttccccccactgtgatgttccctccacagtccgtgctgtccctctcccagtccaaggtactccccgtacctcagaaagcagtaccctacccacaaagggacatgcctatccaggcatttcttctgtatcaagagcctgtcctcggtcctgtaagagggccatttcctataatcgtg

SEQ ID NO: 592 - DNA, 672 bp, synthetic construct
  source 1..672: mol_type = other DNA
atgaaagtattgatcttggcatgtctggtcgctctcgcccttgcacgcgaattggaggagcttaatgtacctggtgaaattgtcgagagcctttctagtagcgaagaatctatcacaagaataaataaaaagatcgagaaatttcaaagcgaagaacagcagcaaaccgaagacgaactccaagacaagatacaccccttcgcccagactcagtctcttgtctacccatttccaggcccaatccctaattctctgccccagaacataccacctttgactcagactcctgttgtagtaccacccttccttcaacctgaggtgatgggagtgtccaaagttaaagaagccatggcacccaaacataaggaaatgccctttcccaagtatcccgtcgaaccattcacagagtctcaaagcctgacactcaccgatgttgagaatctccacttgccactccccctgttgcagtcctggatgcaccaacctcaccaaccccttccccctaccgtcatgtttccacctcagagtgtgctgtctcttagccaatccaaagttctgccagtaccacagaaggctgtcccttaccctcagagggatatgcccattcaggctttcttgttgtaccaagagccagtcctgggtcccgttcgtggccctttccccattatcgtt

SEQ ID NO: 593 - DNA, 672 bp, synthetic construct
  source 1..672: mol_type = other DNA
atgaaagtcttgattctcgcatgccttgtggccctggcattggcaagagaacttgaggagttgaacgtacctggagagattgtagaaagtcttagcagctccgaggagtcaattacacgtatcaacaagaaaatcgaaaagttccagtctgaagagcaacagcagaccgaagatgaattgcaggacaaaatccatcccttcgcccagacacagagcttggtgtatccattccctgggccaattccaaattcattgccacagaatatccccccacttacccaaacccccgtggtcgtccccccattcttgcagccagaagtgatgggcgtgtctaaggtgaaagaggctatggctcctaaacataaagaaatgcctttccctaagtacccagttgaaccatttactgagtctcaaagccttactctgacagatgtcgaaaacttgcatctgcctcttccactgctccagtcatggatgcaccaacctcatcaacctcttccccctacagttatgtttccacctcagtctgtgctgagcctgagccagtctaaagtgcttcccgtgccacaaaaagcagtcccttacccccagagggatatgccaatccaggctttccttctctatcaagagcctgtgctggggcccgtcagaggccccttccctatcatagtt

SEQ ID NO: 594 - DNA, 672 bp, synthetic construct
  source 1..672: mol_type = other DNA
atgaaggttctcatcttggcctgtctggttgctttggctttggccagggaacttgaagaacttaacgttcccggtgaaattgtggagagtctgagtagtagtgaagaatctataactcgtattaacaagaaaatcgagaaatttcaaagtgaggaacagcagcagacagaggatgaattgcaagacaagattcatccattcgcacagacccaatcccttgtctaccctttcccaggaccaatacccaattcactgccacagaacataccccctctcacacagacacccgtggtagtccctccctttcttcagccagaagtgatgggggtctccaaggtgaaagaggcaatggctccaaaacacaaagagatgccattccccaagtatcctgtagaacccttcaccgagagtcagtctttgactctcactgatgtggagaatctgcatctgcctttgcctctcctccaatcatggatgcaccagcctcaccagcccttgccaccaaccgttatgttccctcctcagagcgtactcagtctctctcaatctaaggtattgcccgttcctcagaaggcagtcccttaccctcagagagatatgcctattcaggcttttctcttgtatcaggagcctgtcttgggtccagtgcgcggtccttttccaatcattgtt

SEQ ID NO: 595 - DNA, 672 bp, synthetic construct
  source 1..672: mol_type = other DNA
atgaaggtactgattctggcctgtcttgtggcacttgccttggcccgcgagctcgaggagctcaacgtgcccggtgaaatagtcgaatcccttagcagtagtgaggagagtatcactcgtatcaacaaaaaaatagagaaattccaaagtgaggaacaacagcagaccgaagatgagcttcaggataaaatccatccatttgcccaaactcaatccttggtgtatccttttccaggcccaatccctaattccctcccacagaacataccccccttgacccaaaccccagtcgttgtgccaccattccttcaaccagaagttatgggggtctccaaagtcaaggaggcaatggcacccaaacacaaggagatgccattcccaaagtacccagtggaaccttttactgagtcacaaagcttgacactgaccgatgtggaaaacctgcaccttccacttcctctcctgcagagctggatgcaccagccccatcaacctttgcctccaaccgtaatgttcccaccacaaagtgtcctctcactttctcagtcaaaggttttgcctgtaccacaaaaagccgtcccttacccccagcgtgacatgcccatccaagccttccttctctaccaagaacctgttcttggccccgttagggggcctttccctatcatagtg

SEQ ID NO: 596 - DNA, 672 bp, synthetic construct
  source 1..672: mol_type = other DNA
atgaaggtgcttattttggcttgtctggttgctctcgccttggctcgtgagcttgaagaactcaatgtgcccggagagattgttgagagcctgtcctcctctgaagagagcataactagaattaataagaaaatagaaaaattccaatccgaggaacaacaacaaacagaggatgaactccaggataagatacatccctttgcccaaacacagtctcttgtttatccattccccggacccatacccaactcacttccccaaaatatcccacccctcacacagactcccgtagtggtccctcctttccttcagcccgaggttatgggagtttccaaggttaaggaggctatggctcccaagcataaagaaatgccctttccaaagtatccagtcgagccttttacagaatcccagtccttgacactcactgacgttgagaatttgcacctgccactgccacttctccaaagttggatgcaccaaccccaccagccactgccccctacagtcatgttcccacctcagagtgtcctctcccttagtcaatccaaggttctgcctgtaccacaaaaggccgtcccatatccccagcgtgatatgccaattcaggcttttctcctttatcaagagcccgtacttggacctgtgagaggtccattcccaataatagtg

SEQ ID NO: 597 - DNA, 672 bp, synthetic construct
  source 1..672: mol_type = other DNA
atgaaggttcttatcctggcttgtttggtggcattggctttggcacgtgagctggaggaacttaatgtgcctggcgaaatcgtagagtccttgtcctcctctgaagaatccataacccgtataaataagaagattgagaagttccagagtgaggaacagcagcaaacagaggacgagttgcaagataagatacaccctttcgctcaaactcaatctctggtgtacccctttccagggccaatacccaactcactccctcagaacattccacctttgactcagactccagtggttgttcctccttttttgcagccagaggttatgggagtgtcaaaagttaaggaggccatggcccctaaacataaggaaatgcctttccccaagtatcccgtggagcctttcacagagtcacaaagtctgactcttacagacgtggagaatcttcacttgccattgcctctcctccagtcttggatgcaccaaccccatcaacccttgccacctaccgttatgtttcctcctcagtcagtactctctttgtcacagtcaaaagtccttcccgtccctcaaaaagcagtgccttaccctcagagagacatgcctattcaagcctttttgctttaccaagaacctgtcctcggacctgtgcgtggccccttcccaataattgtg

SEQ ID NO: 598 - DNA, 672 bp, synthetic construct
  source 1..672: mol_type = other DNA
atgaaggttctgatcctcgcctgcctcgtcgctctcgcattggcaagggaactggaggaactgaatgtgcctggtgaaatcgtggagtctctttcttccagtgaagaaagtatcaccagaataaataagaaaatagagaaattccagtctgaagaacagcaacagacagaggacgagcttcaggataagatccatccttttgcccaaactcagagcctggtgtatccattcccaggacccatacccaactcccttccccaaaatattccaccactcactcagactccagttgtagtgcccccattcttgcagcctgaagtgatgggggtttccaaggtcaaagaagctatggcaccaaaacacaaagagatgccctttcccaagtatcccgtggaaccttttactgaatcccaatcactgacacttacagacgtagaaaaccttcacttgcccctccctctccttcagagctggatgcatcaacctcatcaacccttgcctcctacagttatgttccctccacaatccgtcctgagcctctctcagtccaaagttctccccgtcccacagaaggccgttccctaccctcagagggatatgcctatacaggcattcctgttgtaccaagagcctgtactcggacctgtccgtggtccttttcccatcatagtt

SEQ ID NO: 599 - DNA, 672 bp, synthetic construct
  source 1..672: mol_type = other DNA
atgaaagtcctcatactcgcttgtctcgtggctcttgcactcgctagagaactggaggaacttaacgtacctggtgaaattgtagagtccttgtctagcagtgaggaatccatcacacgcataaataagaagatcgaaaaatttcagagtgaagaacaacaacaaaccgaagatgaattgcaggataaaattcatccctttgcccaaacccagagcttggtatatcccttcccaggccctatacccaacagccttccacaaaatattccccctcttactcaaacaccagtggttgtgccccctttccttcagcctgaagtaatgggagtcagcaaagtaaaggaagcaatggcccccaaacacaaagagatgccctttcccaagtatcccgtggagcctttcaccgaaagccagagcctgacactcactgacgttgagaatcttcacctccctctccctctcctgcaatcttggatgcaccagccccaccaacctcttccacctactgtgatgtttccccctcaatcagtcctgtctctttctcagtcaaaagtcctcccagtccctcagaaggccgtcccttatccccagcgcgatatgcctattcaagcattcctgctgtatcaagagcccgtgctgggacccgtaaggggacccttcccaataattgtg

SEQ ID NO: 600 - DNA, 672 bp, synthetic construct
  source 1..672: mol_type = other DNA
atgaaagtgctgattctcgcttgtttggtggcccttgcactcgccagggaactcgaagagttgaatgttccaggcgaaatcgttgaatcactctcctctagcgaagaatctatcacccgtattaacaagaagatcgaaaaatttcagtctgaggaacagcaacaaacagaggacgaactgcaggacaaaattcaccctttcgcacagacacaaagtctggtatatccctttcccggaccaatcccaaattcactccctcagaacatcccacccttgactcagacccctgtagttgtccctccttttctccaacccgaggtcatgggggtctccaaagtaaaagaggcaatggcaccaaaacataaagagatgcccttcccaaagtatcctgttgagccttttacagagagccagtcactgacattgaccgacgttgaaaaccttcatttgccacttccccttctccaatcctggatgcatcaaccacaccagccattgccacccacagtcatgttccctccacagtctgttctgagcctctcacaaagcaaagtgctgcctgttcctcaaaaggcagttccttatcctcagagagatatgccaatacaagcattcctcctttatcaagagcctgtcctcggacccgtaaggggcccattccctatcatcgtg

SEQ ID NO: 601 - DNA, 672 bp, synthetic construct
  source 1..672: mol_type = other DNA
atgaaagtacttatactcgcttgtctcgtggctctggcattggcccgtgaactggaagagcttaatgtcccaggagagattgtggaaagtctgtctagttcagaagaaagtataacacgcattaataaaaagatcgaaaagtttcagagtgaggaacagcagcaaactgaagatgaacttcaagacaagattcacccttttgcacaaacacagtcacttgtgtatcctttccctggacccatacccaactcccttccacaaaatatacctcctttgacccagacaccagtagtcgtaccacccttcctgcaacccgaagttatgggtgtttctaaggttaaggaagcaatggcccccaaacacaaggaaatgccttttccaaaataccctgttgaacctttcaccgagtctcaatccctcacacttaccgacgtagaaaatctccatcttcctcttcccctgctccagtcctggatgcaccagccacatcaacctctgcccccaactgtcatgttccctcctcagtccgtgctctccctgtcacagtcaaaagtactgccagttcctcaaaaggcagttccctacccccagcgtgacatgcctatccaggcctttctcctttaccaagaaccagtacttggtcctgtgagggggccatttccaataatcgta

SEQ ID NO: 602 - DNA, 672 bp, synthetic construct
  source 1..672: mol_type = other DNA
atgaaggtcctcatccttgcctgcctggtggctctggcccttgcaagagaacttgaagaattgaatgttccaggagagattgttgaaagtctctcctcttctgaggaaagcatcacaagaatcaacaagaaaattgagaagtttcagagtgaagagcaacaacagactgaagatgaattacaagataagattcatccttttgctcaaacacagtcacttgtgtatccattccctggaccaattccaaattctttaccacaaaacattcctcctctgactcaaactcctgtcgttgttcctccgttcttgcaaccagaagttatgggagtttcaaaggttaaagaagcaatggctccaaagcataaagagatgccattcccaaaataccctgtggagcctttcacagaatctcaaagcttgactctcactgatgttgagaatcttcatttgcctcttccattgcttcaatcatggatgcatcaacctcatcagcctttgccaccaacagtgatgtttccacctcaatctgttctctctctttctcagtctaaagttcttccggttccgcagaaagctgtgccttatcctcagagagatatgcctattcaagcttttcttctctaccaagaaccagttttgggtcctgttcgtggtccatttcccatcatagtt

SEQ ID NO: 603 - DNA, 732 bp, synthetic construct
  source 1..732: mol_type = other DNA
atgaaggtcctcatccttgcctgcctggtggctctggcccttgcaagagaacttgaagaattgaatgttccaggagagattgttgaaagtctctcctcttctgaggaaagcatcacaagaatcaacaagaaaattgagaagtttcagagtgaagagcaacaacagactgaagatgaattacaagataagattcatccttttgctcaaacacagtcacttgtgtatccattccctggaccaattccaaattctttaccacaaaacattcctcctctgactcaaactcctgtcgttgttcctccgttcttgcaaccagaagttatgggagtttcaaaggttaaagaagcaatggctccaaagcataaagagatgccattcccaaaataccctgtggagcctttcacagaatctcaaagcttgactctcactgatgttgagaatcttcatttgcctcttccattgcttcaatcatggatgcatcaacctcatcagcctttgccaccaacagtgatgtttccacctcaatctgttctctctctttctcagtctaaagttcttccggttccgcagaaagctgtgccttatcctcagagagatatgcctattcaagcttttcttctctaccaagaaccagttttgggtcctgttcgtggtccatttcccatcatagttgcttcgtggagccacccccaatttgagaaacctcaggagtctcagaagagagctgtggct

SEQ ID NO: 604 - DNA, 675 bp, synthetic construct
  source 1..675: mol_type = other DNA; note = Beta wild type
atgaaggtcctcatccttgcctgcctggtggctctggcccttgcaagagagctggaagaactcaatgtaccgggtgagattgtggaaagcctttcaagcagtgaggaatctattacacgcatcaataagaaaattgagaagtttcagagtgaggaacagcagcaaacagaggatgaactccaggataaaatccacccctttgcccagacacagtctctagtctatcccttccctgggcccatccctaacagcctcccacaaaacatccctcctcttactcaaacccctgtggtggtgccgcctttccttcagcctgaagtactgggagtctccaaagtgaaggaggctatggctcctaagcacaaagaaatgccctttcctaaatatccagttgagccctttactgaaagccagagcttgactttgactgatgttgaaaatcttcatttgcctcctctcttgctccagtcttggatgcatcagcctcaccagcctcttcctccaactgtcatgtttcctcctcagtccgtgctgtccctttctcagtccaaagtcctgcctgttccccagaaagcagtgccctatccccagagagatatgcccattcaggcctttctgctgtaccagcagcctgtactcggtcctgtccggggacctttccctattattgtctaa

SEQ ID NO: 605 - DNA, 570 bp, synthetic construct
  source 1..570: mol_type = other DNA
atgatgaaatcttttttcttggtagttaccattcttgccttgacccttcctttcttgggtgcccaggaacaaaaccaggaacaacccatacgttgcgaaaaagatgagaggtttttttccgataaaatcgccaaatacatcccaattcaatacgttctttcaagatatccaagttatggcttgaattattatcaacaaaaacccgtggctctcattaacaaccaattcctgccttacccctattacgccaaacccgcagccgttcgttctcctgcacagatccttcaatggcaagtattgtctaacactgtaccagccaagtcttgtcaagctcaacctactacaatggcaaggcatccacatccacatttgtcttttatggcaataccccctaaaaagaatcaggacaaaactgaaattcctaccataaataccatagcaagtggggagcccacaagcacacctacaacagaggccgtggaaagcactgtggctactcttgaggatagccccgaagttattgaatcaccccccgaaattaatacagtccaagttaccagcaccgctgtc

SEQ ID NO: 606 - DNA, 570 bp, synthetic construct
  source 1..570: mol_type = other DNA
atgatgaaatccttttttctcgtggtgactatcctcgctctcaccttgcctttcctgggtgctcaagagcagaaccaagaacagcctatccgctgcgaaaaggatgaacgttttttcagcgataagattgcaaaatatataccaattcaatacgtgctgtcacgttatccatcttacgggttgaactattaccaacagaagcctgtggccctcattaacaaccaattcttgccttacccttattacgccaaacccgcagccgtaaggtctccagcacaaatactccaatggcaagttctgtctaacaccgtgccagcaaagagctgtcaagcccaacctaccactatggccaggcatccccatccacacctttcttttatggccattccaccaaagaaaaatcaagacaaaacagaaattcctaccataaatactatcgcatccggcgaaccaaccagcactccaaccactgaggcagtggagtccaccgtcgccaccttggaggacagtcccgaggtaattgagtccccccctgagataaacacagttcaagttacatctacagcagtg

SEQ ID NO: 607 - DNA, 570 bp, synthetic construct
  source 1..570: mol_type = other DNA
atgatgaagtcattcttcctcgtggtaaccatactcgccttgacccttccctttttgggagctcaggaacagaaccaagagcagcccattcgttgcgaaaaagatgaaagattttttagcgacaaaatagcaaaatatatacccatccaatatgtgttgagtaggtatccctcctacggcttgaactattaccaacagaaacctgtagcacttatcaataaccagttccttccctatccttattacgcaaaacccgcagctgtgaggtcaccagcacagatcctccagtggcaggtgctcagtaataccgtacctgcaaagagctgtcaggcccaacctacaactatggcacgccatccccaccctcacctctcttttatggcaattcccccaaagaagaaccaagacaaaacagaaattcctacaattaacactattgcatcaggtgaacctactagcacacctacaacagaagccgtcgagagtaccgttgctaccctggaggactcacccgaggtgatagaatctcctccagaaattaatacagttcaagtcacttcaaccgcagtt

SEQ ID NO: 608 - DNA, 570 bp, synthetic construct
  source 1..570: mol_type = other DNA
atgatgaagagcttcttcctcgttgtaaccattttggcacttactcttccattcttgggtgcacaagagcaaaaccaagagcagcctatccgttgtgagaaggacgagagatttttcagcgataaaatcgccaaatacatacctatccaatatgtcctgtcacgttacccctcttatggcctgaactactaccaacaaaagccagtggctctgatcaataatcaattcctcccatacccctattacgctaagccagctgctgtcaggagccccgctcaaatacttcaatggcaggtcttgtccaataccgtgcctgcaaagtcctgtcaggctcaacctactactatggcccgtcatcctcatccccacctctccttcatggctatccccccaaaaaaaaatcaagacaaaaccgaaatacccacaattaacacaatcgccagtggcgagccaacaagtacacctacaacagaagccgtggaatctactgttgcaaccttggaggactcccctgaggtgatcgagagtccaccagaaataaacaccgtccaggtgaccagcacagctgta

SEQ ID NO: 609 - DNA, 570 bp, synthetic construct
  source 1..570: mol_type = other DNA
atgatgaagagctttttcttggttgttactatccttgctttgaccttgcctttcttgggtgctcaagaacaaaatcaagaacaacctattagatgtgagaaggacgaaagattcttctctgacaaaatagctaaatatattccaatccaatacgtcctgtcacgctatccatcttatgggttgaattactaccagcaaaaacctgtagcacttatcaataatcagttcttgccttatccttattacgccaaaccagcagcagtgaggtcccccgctcaaatactgcaatggcaagttctcagtaatacagtaccagcaaagtcctgccaagcacaaccaactacaatggcaaggcatccacaccctcacttgagcttcatggccatcccacctaagaagaaccaggataagaccgaaattccaaccataaataccatcgcatctggagaacccactagtacccccacaactgaagccgtggaatccactgttgctactttggaggactcaccagaggttattgaaagcccacccgagatcaataccgtccaagtcacctccactgccgtt

SEQ ID NO: 610 - DNA, 570 bp, synthetic construct
  source 1..570: mol_type = other DNA
atgatgaagtccttcttcttggtagtgacaatcctggcactcactttgcctttccttggtgctcaggaacaaaaccaagagcaaccaataagatgtgaaaaggacgagcgcttttttagcgataagatcgccaagtatattccaatccaatatgttctctccaggtatcctagttacggtcttaactattaccaacaaaaacctgttgccttgattaacaatcagttccttccttacccatattatgccaagccagccgcagtcagatccccagctcagatactgcagtggcaggtccttagcaatacagtacccgctaaatcctgccaagcccagcccactactatggctaggcatccacatccccacctctcatttatggccatcccacctaagaaaaaccaggataaaaccgaaatccctaccattaacacaatagcttccggcgagcctacaagtacccctactactgaggcagtcgagagtaccgttgctacacttgaagatagcccagaagttatcgaatctccccctgaaatcaacaccgtgcaggttacatccaccgccgtc

SEQ ID NO: 611 - DNA, 570 bp, synthetic construct
  source 1..570: mol_type = other DNA
atgatgaagtcattctttctcgtggtcactatcctcgccttgaccctcccctttctgggagctcaagagcaaaatcaagagcaaccaattagatgcgaaaaggatgagcgctttttcagtgataaaattgcaaaatatatccctatacagtatgtgttgtcacgttatccatcttatggtcttaattactatcagcagaagccagtagctctcataaacaatcagtttcttccatacccttactacgcaaaacccgccgctgttcgttcacctgcccagattctccagtggcaggtcctcagtaacactgtccctgcaaaatcatgtcaagctcaaccaactacaatggcccgccatcctcacccacacttgtctttcatggccatccctcctaagaaaaaccaagataaaactgagatccctaccataaatacaatagcaagcggcgagcctacttcaacacctacaactgaggcagtggagagcaccgttgctacccttgaggactccccagaggtgatagagagtccaccagaaattaataccgttcaggttacctctacagccgta

SEQ ID NO: 612 - DNA, 570 bp, synthetic construct
  source 1..570: mol_type = other DNA
atgatgaaaagtttttttctggtcgtaaccattctggcccttacactgccatttttgggcgcacaggagcagaatcaggaacagccaatccgttgcgagaaagatgagcgcttcttcagtgacaagatagccaagtatataccaattcaatatgtcctctctaggtatcccagctacggtcttaattattatcaacaaaaacctgtcgctcttataaacaaccagttccttccctacccctattacgcaaagcctgctgctgtaagatcacccgctcaaatcctccagtggcaggtcctttccaacaccgttccagcaaaaagctgtcaggcccagcctaccactatggcaagacatcctcaccctcacctttcatttatggcaattcctcccaaaaagaaccaagataagacagagatcccaacaatcaacacaatagcctcaggagaacctacttcaacacctacaaccgaggccgtggagtcaacagtagccactttggaagactctcctgaggtcatcgagtcaccacctgagatcaatactgtgcaggttacatcaaccgcagtc

SEQ ID NO: 613 - DNA, 570 bp, synthetic construct
  source 1..570: mol_type = other DNA
atgatgaaatcctttttcctggtcgtgactatacttgctctcacccttccttttctcggagcacaagaacaaaaccaggagcaaccaatacgctgcgaaaaagacgaacgctttttcagtgacaaaatcgctaaatacattcctatacaatacgtcctttctcgttatccttcctacggcctcaattattatcaacagaaacctgtagcacttattaacaaccaattcctcccctatccctactacgcaaagcctgctgccgttagaagtcctgcacaaattcttcaatggcaagtacttagtaacacagtgcctgccaaatcatgccaggcacaaccaaccactatggcccgccatcctcatccccatctttccttcatggcaatacctcctaagaaaaatcaagacaagacagagattccaacaatcaatactatagcttcaggagaaccaaccagcacccccaccaccgaagccgtcgaatccacagtcgccactttggaagactcacccgaagttattgagtccccaccagaaatcaacacagtgcaggtcacaagtactgctgtt

SEQ ID NO: 614 - DNA, 570 bp, synthetic construct
  source 1..570: mol_type = other DNA
atgatgaaatcttttttccttgtggttaccatccttgctttgaccttgccatttttgggagcccaagagcaaaaccaggagcagcctataaggtgtgaaaaagatgaacgctttttctctgataaaatcgcaaagtacataccaatacagtacgtcctttctaggtatccatcctatggtctcaattattatcaacagaaaccagtggcactcatcaataatcagtttctcccttatccctattatgctaagcctgccgctgttaggtctccagcacagattctccaatggcaagtactcagcaatactgttcctgctaagagctgtcaagcacaaccaacaacaatggctagacatccacacccccatctttcttttatggctatcccacccaagaagaaccaagacaagaccgaaatacccactataaataccattgcctctggggaacccacatctacacctactactgaggctgttgaaagcactgtcgcaaccttggaggattcccccgaagttattgagtcaccccccgagataaataccgtgcaagtaacatcaaccgcagtt

SEQ ID NO: 615 - DNA, 570 bp, synthetic construct
  source 1..570: mol_type = other DNA
atgatgaagagcttttttctggttgtgacaatactggccctgacccttccttttctgggggcacaagagcaaaaccaggagcagccaatccgttgcgagaaggacgagcgttttttctccgataagatcgctaaatacatacctatacaatatgttttgtccaggtatccatcttatggcctcaattactaccagcagaagccagtggccttgataaataatcaatttctcccatatccctattacgccaagccagcagcagttcgctctccagcacagattctgcaatggcaggttctgtccaataccgttcccgcaaaaagctgtcaagcccagcccacaactatggcaagacatcctcatcctcacctttctttcatggccatccctcctaaaaagaaccaagataaaaccgaaattcccaccattaacactatagcctcaggggagcccacctcaactccaactacagaggccgttgaaagcactgtagccactctcgaagattcacctgaggtaattgaatcccctcccgagatcaacaccgtacaggtgacatccactgctgtt

SEQ ID NO: 616 - DNA, 570 bp, synthetic construct
  source 1..570: mol_type = other DNA
atgatgaagtccttctttcttgtcgtaacaattcttgctcttactctgcccttccttggcgctcaagaacaaaaccaggaacaacctatccgctgcgaaaaagacgaaagattcttcagcgacaagatcgctaaatatattcccatacagtatgtactgtctagatacccaagctacgggcttaattattatcagcagaaacctgttgccctcataaataatcagtttttgccctatccatactacgctaagcctgccgcagttcgttcacccgctcaaatactccagtggcaagtgctttccaacacagtacctgcaaagtcctgtcaagctcaaccaactactatggccagacatccccatccccacctgagctttatggcaatacctcctaaaaaaaatcaagacaagactgaaatcccaactataaacaccatcgcctctggtgagcccacctcaacacctaccactgaggccgtcgagagcaccgtagccacactggaagattccccagaggtaatcgaaagcccccccgagatcaacacagttcaggtgacatccaccgctgtg

SEQ ID NO: 617 - DNA, 570 bp, synthetic construct
  source 1..570: mol_type = other DNA
atgatgaaatccttcttcctggtggtgaccattctggcccttaccttgcctttccttggcgcccaggaacaaaatcaggagcagccaataaggtgcgaaaaggatgaaaggttcttctcagataaaatcgcaaaatacatccccattcagtacgtcctttccagatacccatcctatggtcttaattactaccagcaaaagccagtagcacttattaacaaccaattccttccctacccatattacgcaaagcccgcagccgtaagaagtccagctcagattttgcaatggcaggtattgtctaacactgtcccagcaaaatcatgtcaagcacagcccaccacaatggcccgccaccctcacccacatctttcttttatggcaatccctcccaagaaaaatcaggataaaaccgaaatccccacaataaatactatagctagcggggaaccaacatcaacccccacaacagaagcagtcgagtctaccgttgcaactctggaggattcaccagaggtgattgaatctccccctgaaatcaacacagtccaagtcacaagcactgcagtt

SEQ ID NO: 618 - DNA, 570 bp, synthetic construct
  source 1..570: mol_type = other DNA
atgatgaaatccttcttccttgttgtcacaattctggccctcaccctgcccttcctcggagcacaggagcagaatcaagagcagcccatacgctgcgaaaaggatgagcgtttcttcagtgacaagatcgcaaaatatattccaattcaatacgttctttctaggtatccttcttatggtttgaattattaccaacaaaaaccagtggctttgataaacaatcaatttctgccttacccttattatgcaaagcctgccgcagtacgcagcccagcacagatccttcagtggcaggttttgtccaacactgttcccgccaagtcttgccaagcacagcctaccactatggcccgccacccacacccccacttgagcttcatggctatacccccaaagaagaatcaggataagacagagattccaacaattaacactatcgctagtggcgagccaacctctacaccaaccaccgaggctgtagagtcaactgttgcaacactcgaggatagtcctgaggtgatcgagtctccacctgaaatcaacacagtccaggttaccagcaccgccgta

SEQ ID NO: 619 - DNA, 570 bp, synthetic construct
  source 1..570: mol_type = other DNA
atgatgaagagtttctttctcgttgtcacaattttggcccttaccctccctttcctgggggctcaagagcaaaatcaagagcaacctataaggtgcgaaaaagatgaacgcttcttttccgacaaaattgctaaatacatccccatacaatatgtgctttcccgctacccaagctacggtttgaactactaccaacagaaacctgtcgccctgattaacaatcagtttttgccatatccttattacgctaaacccgccgcagttcgcagtccagcccaaatattgcaatggcaagttcttagcaatactgttcctgccaaaagttgtcaggctcaaccaactacaatggctagacaccctcatccccatctttcatttatggctattccccctaagaaaaatcaagacaaaactgagatacctaccatcaatacaatcgcttctggtgagcctacctccacccctaccactgaggccgttgaatccacagtagcaactttggaagactcccctgaagtgattgagtcaccacccgagataaacacagtccaagtcacatccaccgctgtg

SEQ ID NO: 620 - DNA, 570 bp, synthetic construct
  source 1..570: mol_type = other DNA
atgatgaagagcttctttcttgtggtgaccatcttggctctcacattgcctttccttggtgcccaggaacaaaaccaggaacagcccattcgttgcgagaaggacgagagattcttctccgataagatcgccaagtacatacctatccaatacgtccttagccgctatcctagttacgggcttaactactatcaacaaaaacctgtagcccttatcaacaaccaattccttccctatccatactacgctaaacccgccgccgtaaggagtccagcacagatattgcaatggcaagtgctgtctaacactgtccccgccaaatcctgccaagctcaaccaacaactatggcacgccatccacacccacacctttccttcatggctattccccctaaaaagaatcaagacaaaacagagatacctacaatcaatacaatagcttccggcgaacccacaagcacccctacaaccgaagctgtggaatccactgtcgccacacttgaagattctccagaagtgatcgaatctcctccagaaatcaacacagtccaggttacaagtacagccgtt

SEQ ID NO: 621 - DNA, 570 bp, synthetic construct
  source 1..570: mol_type = other DNA
atgatgaagagtttcttcctggtagtcacaattcttgctcttacccttccattcctgggagctcaggaacaaaaccaagaacaaccaattaggtgtgaaaaagacgagaggttcttttctgacaagattgcaaagtacattcccatacaatacgttctttcacgttatcccagttacggcttgaactattatcagcaaaagccagttgctctcatcaataaccaattcttgccttatccctattacgctaagcccgctgctgtaagatcccccgcacagatactgcaatggcaggtgcttagcaacacagtacccgccaaatcctgccaggcccagcccaccacaatggcaagacacccccaccctcatctctccttcatggcaatacctccaaaaaaaaaccaagataagactgaaataccaacaataaatacaattgccagcggtgaaccaacttcaacccctaccacagaggcagtagaatcaaccgtagcaacacttgaggacagcccagaagtcatagaatcacctcccgaaattaataccgttcaggtgacatcaaccgcagtt

SEQ ID NO: 622 - DNA, 570 bp, synthetic construct
  source 1..570: mol_type = other DNA
atgatgaaatcattttttctggtggtaaccatacttgcattgacccttcctttcctgggagcacaagagcaaaatcaggaacagcctatccgctgtgagaaagacgagagattcttcagtgacaaaatagctaagtacattccaatacagtatgtgctctcccgctacccatcctacgggcttaattattatcagcagaagcctgtcgctctgataaacaatcaattcttgccatatccatattacgccaagcctgcagcagttcgtagtcctgcccagatactccagtggcaggtgctctccaataccgtccccgccaaatcctgtcaagcacagccaactacaatggctcgccatcctcatcctcatctgagctttatggccatcccccctaaaaagaatcaagataagactgagatccccactataaacactatcgcatccggtgaaccaacatccactcctactaccgaggcagtcgagagcaccgtggctaccttggaggattcccctgaggttatagaatcacctcccgagatcaacacagtgcaagtgacatctactgctgtc

SEQ ID NO: 623 - DNA, 570 bp, synthetic construct
  source 1..570: mol_type = other DNA
atgatgaaaagttttttcttggttgttactattttggctcttacactccccttcctgggggctcaggagcaaaatcaagaacagcccataagatgcgagaaggatgaacgcttcttcagcgataaaattgcaaaatacatacctatacagtatgtccttagtcgctatccttcctatggcctgaattattatcaacagaaacctgttgctctgataaataaccagtttctcccttacccttactacgctaagccagctgcagttaggagtcctgcacaaattcttcagtggcaggtgctttccaacactgtccccgcaaaatcttgtcaggcccaacccactactatggctagacacccccatccacacttgagctttatggctatacccccaaaaaaaaaccaggacaaaacagaaataccaactattaacaccatagcatcaggggaacccacatctacacctactactgaggccgtcgagagtacagttgcaaccttggaagattcaccagaggtaatagaaagtcctcccgaaattaacactgttcaggttacctccactgcagta

SEQ ID NO: 624 - DNA, 570 bp, synthetic construct
  source 1..570: mol_type = other DNA
atgatgaagagcttttttcttgtagtgaccatactcgcattgacattgccctttcttggggcccaggaacaaaatcaagaacagccaattcgttgcgaaaaagacgagagattcttttccgacaaaattgcaaagtacattcccattcagtacgttttgagcagatacccatcttacgggctgaactattaccaacagaaaccagtagcattgattaacaaccaatttttgccatacccttattacgcaaagccagcagcagtgcgttctccagctcagatcctccaatggcaagtgttgtcaaacaccgtgcctgcaaagagttgccaagctcagcctacaacaatggctagacatccacatcctcacctctcatttatggcaattccccccaagaagaatcaggacaaaactgagattccaaccatcaacaccatcgcctctggggaacctactagcacccctactaccgaagctgtagagagtaccgtagctactctggaggactctccagaggtgattgaaagtcccccagagataaacactgtccaggtcacctcaactgctgta

SEQ ID NO: 625 - DNA, 570 bp, synthetic construct
  source 1..570: mol_type = other DNA
atgatgaagagctttttcttggtggtaaccatacttgctcttacattgccattcctgggagcacaggagcaaaaccaggagcagcctatcagatgcgaaaaagatgaacgctttttcagcgataagattgccaagtacatccctattcaatacgttctgtccaggtaccccagctatggtctcaactattatcagcagaaacctgtagctttgataaacaaccagtttctcccctacccctattatgcaaaacccgccgctgtgaggtccccagctcaaattttgcagtggcaggtactcagtaatacagttcccgcaaagtcttgccaagctcagcctactaccatggctaggcacccccacccacacttgagctttatggcaatcccccccaaaaagaatcaagataagacagagattcccaccatcaatactatcgcctctggtgaacccacctcaactcccactactgaagctgtcgagtccacagtagctacactggaggatagtcctgaggtgattgagagccccccagaaatcaataccgtgcaagtgacttccaccgcagta

SEQ ID NO: 626 - DNA, 570 bp, synthetic construct
  source 1..570: mol_type = other DNA
atgatgaagtccttttttcttgtcgtaaccatcctggctcttacattgccattcttgggcgcacaggaacagaaccaagagcagcctatccgttgtgagaaagacgaaagatttttctcagacaagatcgcaaaatacattcccattcaatatgtactcagtcgctaccctagttacggcttgaactactatcaacaaaagcctgttgctcttatcaacaaccagttccttccatacccctattacgcaaaaccagcagccgtaagatcacctgcacaaattcttcaatggcaagttctctccaataccgttcctgcaaagagttgccaagcacagcctactacaatggccagacacccccacccacacctgagcttcatggccataccccctaaaaagaatcaagataagacagaaataccaactattaacacaatcgcttcaggcgagcctacttccacacctactactgaggctgtggaatccaccgtagctacccttgaagactcccctgaggtcatagaatcccctcccgaaatcaacaccgttcaagtcacctcaaccgccgtt

SEQ ID NO: 627 - DNA, 570 bp, synthetic construct
  source 1..570: mol_type = other DNA
atgatgaaaagtttctttcttgttgtaacaattcttgctttgaccctcccttttttgggagcacaagagcaaaatcaggagcaacccattcgttgcgaaaaggatgaaaggtttttctccgataaaattgcaaaatatattccaattcagtacgtcctttctcgttatccatcctacggtttgaattattaccagcagaaacccgttgcattgatcaacaaccagttccttccatacccctattatgccaaaccagccgcagttcgttctcccgcccagattcttcaatggcaggtcctgtcaaatacagtaccagctaagtcttgtcaggcccaacccaccactatggctaggcatccccatccccatctttccttcatggctataccacccaaaaaaaaccaagataaaactgaaatccccacaataaacactatagccagcggtgagcctacatccaccccaacaaccgaagctgtagaaagcactgttgccactttggaagattcccccgaagttatagaaagccctcccgaaatcaacaccgtacaagttacatctaccgctgta

SEQ ID NO: 628 - DNA, 570 bp, synthetic construct
  source 1..570: mol_type = other DNA
atgatgaaatcctttttcctggttgttactatcttggctcttacccttccttttctgggtgctcaggaacagaatcaagaacaaccaattaggtgtgagaaagatgagaggtttttttccgataagatagcaaaatacattcccatacagtatgtactgagtcgttaccctagctacggattgaactactatcagcaaaagccagtagctctgataaataatcagtttcttccctacccatactatgctaaacccgcagcagttagatcaccagcacagattcttcagtggcaggtcctctcaaacaccgtccccgctaaatcctgccaagcccaacctactactatggcacgtcatcctcaccctcatttgagttttatggctattcctccaaaaaagaaccaagataaaacagaaatacccactattaacacaatcgctagtggggaacctacctccacacctactaccgaagccgtggaatccactgtcgccactctggaagactctccagaagtcatcgaatcccccccagagattaatacagttcaagttacctctaccgccgtt

SEQ ID NO: 629 - DNA, 570 bp, synthetic construct
  source 1..570: mol_type = other DNA
atgatgaaaagtttctttttggtagtgacaatactggcacttacccttccttttttgggggctcaggagcaaaatcaggagcaacccattagatgcgagaaggatgagaggttcttctctgacaagattgctaaatatattcctatccagtatgtactgagtagatacccttcctatgggctcaactattatcaacagaagccagtagctctgattaacaatcaatttctgccctacccttattacgccaagcccgcagctgtacgctcaccagcccaaatcctccagtggcaggtcctgagtaacactgttcccgctaagagttgtcaggcccaacccactacaatggcccgccatcctcacccacatctcagcttcatggctatccctcctaagaagaaccaggacaagaccgaaatacctacaatcaacactatagcttcaggggagcccacttccacacctactacagaggctgtagaaagtactgttgccaccttggaagactctcccgaagtcatcgagtcacctccagaaataaacacagtgcaagtgacttccacagctgtg

SEQ ID NO: 630 - DNA, 570 bp, synthetic construct
  source 1..570: mol_type = other DNA
atgatgaagagttttttcctcgttgtcaccatactggctttgacattgcctttcctcggagcacaagaacaaaatcaagagcaacctatacgctgcgaaaaggatgaaaggtttttctccgacaaaatcgcaaagtatattcccatacaatacgttctctccaggtatccaagctacggtcttaattactaccaacagaagcctgttgctctgataaacaatcaattcctcccatatccttactacgccaaacctgccgctgtacgttctccagcacagatcttgcagtggcaggttttgagcaatacagtgccagccaagtcatgtcaggcacagcccacaactatggctcgccatcctcacccacatcttagttttatggctattccacccaaaaagaaccaagacaagactgaaatcccaaccataaacaccatcgcctcaggtgagccaacttctaccccaacaacagaggccgttgagtcaacagtcgctacactcgaggattcacctgaagtcattgagtctccaccagaaattaacacagtacaagttaccagcacagcagta

SEQ ID NO: 631 - DNA, 570 bp, synthetic construct
  source 1..570: mol_type = other DNA
atgatgaagtctttttttttggttgttactatacttgctcttaccttgccatttctgggggctcaggagcaaaatcaggaacagccaattcgctgcgagaaggacgaaagatttttctcagacaaaattgctaagtatatccccatacaatacgttctgagccgttacccaagttatggtctcaactattaccaacaaaaacctgtggcacttatcaacaatcaattcctcccatacccctattacgccaagccagccgccgtcaggagtcccgcacagattctccagtggcaagtacttagtaatacagtgcctgctaagtcctgccaggcacagcccacaacaatggctagacaccctcatccccacctgtccttcatggcaatacctcccaagaaaaaccaggacaagacagaaattcccacaattaatacaatagcctccggcgagcccaccagcacccccaccacagaggccgtcgagagtaccgtggctactcttgaagatagccccgaggtaatcgagagcccccctgaaatcaacactgttcaagtgacctcaactgccgtt

SEQ ID NO: 632 - DNA, 570 bp, synthetic construct
  source 1..570: mol_type = other DNA
atgatgaagagcttttttcttgtagtaacaatacttgcccttacactgccttttctcggggcacaagagcaaaaccaagagcagcctatccgctgcgaaaaagatgagcgttttttcagcgacaagatagctaaatatatcccaattcagtatgtcctgagccgctatccttcttatgggctcaactactatcagcaaaagcctgtcgcccttattaataaccagtttctcccctatccatactatgcaaagcctgctgccgttcgttctcccgcacagattcttcaatggcaggtcctctcaaataccgtgccagctaaatcatgccaggcccaacccaccactatggccagacatcctcatccccatctctctttcatggctatcccacctaagaagaatcaagataaaactgagattcccacaattaacactatcgcctctggggagccaacctccacacctacaactgaagctgttgagtcaacagtggcaacacttgaagacagtccagaggttatagaaagccccccagaaatcaacactgttcaggttacaagtaccgctgtc

SEQ ID NO: 633 - DNA, 570 bp, synthetic construct
  source 1..570: mol_type = other DNA
atgatgaagagctttttcctggtcgtgaccattctggctttgaccttgcctttccttggagcccaggagcagaaccaggagcaacctataagatgcgagaaagatgagaggttttttagcgacaagatagcaaagtatatccctattcagtacgttctgtccagatacccttcctatggcctgaactattatcagcaaaagccagtagctctgattaacaatcaattcctgccttatccttattacgccaagcctgctgccgttcgtagccctgcccagatccttcaatggcaagtactctctaacactgttcccgcaaagagttgtcaagcccaacctactactatggcaagacatccacaccctcacctgagctttatggctataccccctaagaagaaccaagataaaaccgagatacccactataaatactattgcctccggtgaacccacatctactcctaccactgaagctgtagaatcaaccgttgccactctcgaagacagtccagaggtgatcgagtcacctccagagatcaataccgtacaggttacctcaactgcagtg

SEQ ID NO: 634 - DNA, 570 bp, synthetic construct
  source 1..570: mol_type = other DNA
atgatgaagtcattttttctcgtggtgacaatactggcactcacactccccttcctcggcgctcaggaacagaaccaagagcagcccatcaggtgcgagaaagatgaaagatttttctcagataaaatagctaaatatatccccattcagtatgtcctttctaggtatccaagctatgggctgaactactaccaacagaaacccgtggctttgataaataatcaatttctgccctacccatactacgccaagcctgccgccgtaaggtctcctgctcagatcttgcagtggcaggttctgtccaacactgtacctgcaaaaagttgccaggctcaacctaccacaatggctaggcaccctcatcctcacttgtcttttatggcaattccccctaaaaaaaaccaagacaagaccgaaatacctactataaataccatcgctagcggagaaccaacctcaacccccactaccgaggccgtagaatctacagttgccacactcgaagactcccccgaagtgatagaaagccctccagagatcaacactgtgcaagtgacaagtaccgccgta

SEQ ID NO: 635 - DNA, 570 bp, synthetic construct
  source 1..570: mol_type = other DNA
atgatgaagtccttctttctggtggtcactatcctggctctgacactgcccttccttggagcccaggagcaaaatcaggagcagcctattcgctgcgaaaaggatgagagatttttttctgataaaatcgcaaagtacatccctatccaatatgtgctcagccgctaccctagttacgggctcaactattaccaacagaaacccgtcgcactgatcaacaaccaattcttgccatacccatattatgcaaaacccgcagctgtcaggtcacccgcacaaattttgcaatggcaagttttgtcaaacacagtaccagcaaaaagttgccaagcacagcccactacaatggcaagacaccctcacccccacctttcctttatggcaattcctcccaagaagaaccaagacaaaacagaaatccccactataaatacaatcgcaagcggcgaacccacctccaccccaactactgaagcagttgagtctacagtcgctacacttgaagacagccctgaggtaatagaatcccctcctgagattaacacagtacaagtgactagtacagccgtt

SEQ ID NO: 636 - DNA, 570 bp, synthetic construct
  source 1..570: mol_type = other DNA
atgatgaagtcattttttttggttgtaacaatcttggcacttactcttccatttcttggagcccaagaacaaaatcaggaacaaccaatcaggtgcgaaaaagacgaacgctttttttctgacaagatcgcaaaatatattccaatacaatatgtcctgtcaaggtacccatcttacggactcaattattatcaacagaagcccgtggcccttatcaacaaccagttcctcccctacccatactacgcaaagcctgccgccgttagaagcccagcccaaattttgcaatggcaagttctgagcaatactgtacctgccaaaagctgccaggcccagccaacaacaatggcaagacacccacatcctcacttgtcatttatggccatccctcctaaaaaaaaccaagacaaaaccgaaatccctaccatcaacactatagcaagcggcgagcccacatctacacccaccacagaggcagtcgaaagcacagtggcaactctggaggatagccctgaggtaatcgagtcaccccctgaaatcaacacagttcaggtgacatccacagccgtc

SEQ ID NO: 637 - DNA, 570 bp, synthetic construct
  source 1..570: mol_type = other DNA
atgatgaagagtttcttcctcgtggttactatacttgccttgacattgccctttctgggggcacaggagcagaatcaagagcagccaattcgctgtgagaaagatgagagatttttttctgacaaaatagccaaatacattcccattcagtatgttctttctagatacccctcatacggtctgaactactatcaacagaagcctgtagccttgataaacaaccaattcctcccatatccttactatgcaaaacccgccgccgtgcgttccccagcccagatacttcagtggcaggtcctgtcaaacaccgtgcctgcaaagtcctgccaagcacaaccaacaacaatggcaagacatccacacccccacctctcattcatggctatcccaccaaaaaagaatcaggataagaccgaaatccccacaataaatactattgcttctggagaacctacaagtactcccacaactgaagctgtcgaaagcaccgttgccacacttgaagactcccccgaggtaatagagtcccctcctgaaataaatactgttcaagtgacttctactgctgtg

SEQ ID NO: 638 - DNA, 570 bp, synthetic construct
  source 1..570: mol_type = other DNA
atgatgaaaagtttttttctcgtggtcacaatacttgctctcactttgccttttcttggcgctcaggaacagaatcaagaacaacctattaggtgtgaaaaagacgaacgcttctttagcgataaaattgctaaatatatccccatacaatatgtattgagccgttatcccagctatggccttaactattatcaacagaagccagttgctctcatcaacaatcaatttctcccttatccctactatgcaaaacccgcagccgttagatccccagcccagatactgcagtggcaggtactgtccaatacagtccccgccaagtcatgccaagcacagcccactaccatggctaggcacccacacccccatctcagcttcatggctatccctccaaaaaagaatcaggacaaaaccgagattccaacaattaacaccatagcttcaggagaacccacatcaactcctacaaccgaggccgttgagagcaccgtcgctacattggaggacagccctgaagtgattgaatcccccccagagattaacaccgttcaagtgaccagtaccgctgtt

SEQ ID NO: 639 - DNA, 570 bp, synthetic construct
  source 1..570: mol_type = other DNA
atgatgaagtccttttttttggtcgtgactattcttgctttgacacttccctttttgggtgcacaagagcaaaatcaggaacaaccaatcagatgcgagaaagacgagcgttttttttccgacaagattgcaaaatacattccaatacagtacgtcctctcacgctatcctagctatggcctgaattattatcaacagaagccagtcgccttgataaacaaccagtttcttccatacccctattacgcaaaaccagcagccgtccgctcccctgcccaaatcctccagtggcaagtgctgtccaacaccgtaccagctaaaagttgccaggctcagcctacaactatggcaaggcacccccacccacaccttagtttcatggcaatcccacccaagaagaaccaagacaaaacagaaatcccaacaataaatacaatcgcctccggagaaccaacctccacacctaccactgaggcagtagaatcaactgttgctaccctcgaagattccccagaggttattgaatcacccccagagattaacactgtgcaagttacctccacagccgtg

SEQ ID NO: 640 - DNA, 570 bp, synthetic construct
  source 1..570: mol_type = other DNA
atgatgaagtcattctttcttgtagtaactattctcgcactcacactcccctttcttggagcacaggaacagaaccaagagcagcccattcgttgtgaaaaagacgaaagattcttctcagacaagatcgccaaatatatccccattcagtacgtactcagccgctatccttcctacggtcttaactattaccagcaaaagccagttgctctcattaacaaccaatttcttccttacccatactacgcaaaaccagccgcagtccgctctcctgcacaaattcttcaatggcaggtgctcagcaataccgtacctgccaagtcctgccaagctcagcccaccaccatggccagacatccccacccccacctgagctttatggcaatacccccaaagaaaaatcaggacaagaccgagatccccactataaatactatcgcctccggtgagccaacctccacacccactacagaggccgttgaatccaccgttgctacactggaagattctcctgaagtgatcgaatcccctcctgagatcaatactgttcaggttacaagcactgctgtc

SEQ ID NO: 641 - DNA, 570 bp, synthetic construct
  source 1..570: mol_type = other DNA
atgatgaagagcttttttcttgtcgtgacaatactcgccctgacactcccattcttgggagctcaagaacaaaaccaagagcagcccataaggtgtgaaaaagacgaaaggttttttagtgataaaattgctaagtatatccccattcagtatgtactttcaaggtatccttcttacggactcaattactaccaacaaaagcccgttgctcttattaacaaccagttcttgccttatccctactatgccaagccagcagctgttaggtcacccgcacaaatactgcaatggcaagtcctgtctaacacagtcccagctaagtcctgtcaggctcaacccactacaatggctcgtcatccccatcctcatctgtccttcatggcaataccccccaaaaagaatcaggataaaactgaaatccctaccatcaacactatagcatctggtgaacccacctcaaccccaaccactgaggctgtagaatccaccgtcgccactctcgaggactcccctgaggtgatcgaatcaccacccgagatcaataccgttcaggtaacctccacagccgta

SEQ ID NO: 642 - DNA, 570 bp, synthetic construct
  source 1..570: mol_type = other DNA
atgatgaaatcattttttctggtcgtaactatactggctctgaccctgcctttcttgggtgcccaggagcaaaaccaagaacagcctattcgctgtgagaaggacgaaagatttttttctgacaagattgccaagtacataccaatacaatacgtgcttagcaggtatcctagctatggacttaattattatcaacagaagcccgttgccctcataaacaatcaatttctcccttatccttattacgccaagccagcagccgtccgttcccccgcacaaattctgcagtggcaggtgttgtcaaacactgttcctgccaaaagttgtcaagcacaacccactaccatggcaaggcacccccacccacatctgtcttttatggcaatccccccaaagaaaaaccaggataaaaccgagatacctactattaacaccatagcatctggtgagcctacaagtacaccaaccacagaagctgtagaaagcacagtcgccacattggaggatagtcccgaggtcattgagagtcctccagagattaacaccgttcaggtcacctcaactgcagtt

SEQ ID NO: 643 - DNA, 570 bp, synthetic construct
  source 1..570: mol_type = other DNA
atgatgaaaagtttttttcttgtggtaactattttggctcttacacttccattcctcggcgcacaggaacagaaccaagaacaacccatccgctgcgagaaggacgaaagattcttctctgataagatcgctaagtatataccaattcaatatgtattgtctcgttatccctcttacgggctgaactactaccaacaaaaacccgttgctcttatcaataaccagtttcttccttacccctattacgcaaagcctgctgcagtcaggtcccctgcccaaatacttcaatggcaggttctttccaacacagtccctgccaaaagctgccaggcacagcctactacaatggctaggcaccctcacccccatctctcttttatggctattcctccaaagaagaaccaagacaagacagaaatccctacaattaacactatcgccagcggtgagcctacttcaactccaacaacagaggcagttgaatccaccgtggctactttggaggacagccctgaggttattgagtctcccccagaaatcaataccgtacaagtaactagcactgctgtc

SEQ ID NO: 644 - DNA, 570 bp, synthetic construct
  source 1..570: mol_type = other DNA
atgatgaaatcattcttcctcgttgtgacaattcttgctcttacactcccctttcttggggcccaggagcaaaatcaggagcaacccatacgttgtgaaaaagatgaacgcttcttctcagacaagatagccaagtacatcccaatccagtacgtgttgagccgctacccctcatacggccttaactattaccagcagaaaccagtagcactcataaataaccaattccttccctacccatattatgcaaagcccgctgccgtgcgtagtcctgcccaaattcttcaatggcaggttctctctaacacagtacccgccaagagttgccaagcacaaccaactacaatggctcgccacccacatcctcacctttccttcatggctatacccccaaagaaaaatcaagataagacagaaattcctactatcaatacaatagcaagtggggagcctacttctacaccaaccactgaggcagttgagtctaccgttgccactttggaggacagccccgaagtcatagaaagtcccccagagatcaacactgtgcaggtcacatctactgccgtc

SEQ ID NO: 645 - DNA, 570 bp, synthetic construct
  source 1..570: mol_type = other DNA
atgatgaagtctttttttcttgtcgtaaccattctggctttgacactcccctttttgggcgcacaagaacagaatcaagagcagcctataaggtgcgaaaaggatgaacgtttttttagtgacaaaatcgcaaaatatatacctattcaatatgtactcagtcgctacccaagttacgggttgaattactaccaacaaaaacccgtggctcttatcaacaaccagttcctcccatacccatactatgccaaaccagcagcagtccgttcacccgcccagatccttcaatggcaagttctctccaacaccgttcctgcaaagagctgccaagcccagcccacaacaatggcacgtcatccccacccccatctttcatttatggcaatcccaccaaagaaaaatcaggacaagacagagataccaacaattaatactattgcttctggagaacccacatctactcccaccaccgaggccgttgagtccactgttgccacacttgaagacagcccagaagttatcgaatcaccccctgagattaacaccgtgcaagtaacctcaacagcagtt

SEQ ID NO: 646 - DNA, 570 bp, synthetic construct
  source 1..570: mol_type = other DNA
atgatgaaaagtttcttcttggttgtcacaatactcgctttgaccctgccctttcttggcgcacaagaacagaaccaggaacaacctatacgttgcgaaaaggacgagaggttctttagcgacaaaatcgcaaaatatattccaatacagtacgttctgagtcgttatccctcatatggcttgaattattaccaacaaaagcccgtagctctcattaacaatcagttccttccctacccttactacgcaaagcccgcagcagtgcgctcccccgcccaaatcttgcagtggcaagtcttgagcaatacagtacctgccaagagttgtcaggcccaaccaactaccatggcacgccatccccacccccatttgtcattcatggctatacccccaaaaaagaatcaagacaagaccgagatacctaccatcaatacaatcgcatcaggggagccaacatcaaccccaaccactgaagcagtagaatctaccgttgctactctggaagacagcccagaggttattgagtctccacctgagataaatacagtgcaagtcacttccacagcagtt

SEQ ID NO: 647 - DNA, 570 bp, synthetic construct
  source 1..570: mol_type = other DNA
atgatgaaatcatttttcttggttgttacaattttggccttgacactcccatttttgggggctcaagaacaaaatcaagagcaaccaatacgttgtgagaaagatgagcgcttctttagtgacaaaatagctaaatacatccctattcaatacgtcctttcacgttaccccagttatgggctgaactactatcagcagaaacctgttgccctcataaacaaccaatttcttccttatccatactacgctaagcctgccgctgttcgcagtcctgctcagatcctgcagtggcaggtgcttagcaatactgtgccagccaaatcctgtcaagcacagccaacaacaatggcccgtcatccccacccacatttgagtttcatggctatacctccaaaaaaaaatcaggataaaaccgagatccccacaattaacactatcgcatctggagaacctacatccacaccaactaccgaggccgtagaaagtaccgttgccaccctggaagactctcccgaagtcatagagtcaccaccagaaatcaatactgttcaggtaacctctactgccgtc

SEQ ID NO: 648 - DNA, 570 bp, synthetic construct
  source 1..570: mol_type = other DNA
atgatgaagtcattcttcctggtggtaactatattggctttgactctcccttttcttggggcccaagaacaaaatcaggaacagcccatcagatgtgaaaaggacgaaaggttctttagcgataagatagctaaatacataccaatacagtatgttctcagccgttacccaagctacggtctcaattactatcagcagaagcccgtcgcccttatcaacaatcagtttctcccatacccctactatgccaagcctgctgcagtccgttcacccgcacagatacttcagtggcaagttctttccaacaccgttccagccaagtcttgtcaagcccaacctactacaatggcaaggcatccccatccacatttgagcttcatggctattcctcctaagaagaaccaagacaaaacagagattcccacaatcaatacaatagctagtggtgagccaacaagcacacctaccacagaggctgtcgaatctaccgtagctacacttgaggacagtcccgaggtcattgagtcccctcctgagattaacactgtccaagtcacctccaccgcagtc

SEQ ID NO: 649 - DNA, 570 bp, synthetic construct
  source 1..570: mol_type = other DNA
atgatgaagtcattctttcttgtcgtaacaattctcgccttgactcttcctttcctcggcgcacaagaacaaaatcaagagcaacctatccgctgcgaaaaggacgagagatttttttcagacaagatagcaaagtatatcccaatacaatatgtcctcagcaggtatccctcttacgggttgaactattatcagcaaaagcccgtcgctcttatcaataatcagtttttgccatacccctactatgcaaaaccagcagctgtgcgtagccctgcccaaatcctgcaatggcaggtcctctcaaacaccgtccctgcaaagtcatgtcaggcacaacctactactatggcaaggcacccacatccccatctctcttttatggccatcccaccaaaaaaaaatcaggataagaccgagatacctaccattaacactatagcctcaggtgagcccacaagcacacctacaacagaagcagttgaatctaccgtagcaacccttgaagattctcctgaggtcatagaaagtccacctgaaattaataccgtccaggtcactagcacagccgtt

SEQ ID NO: 650 - DNA, 570 bp, synthetic construct
  source 1..570: mol_type = other DNA
atgatgaaaagttttttcttggtggtaactatcttggccctgactctgcccttcctcggagcccaagaacaaaaccaagagcagccaatacgttgcgagaaagatgagcgtttcttttcagataaaatcgctaagtacatcccaatccaatatgtattgtccaggtacccctcatacggacttaactactatcaacagaagcctgtcgctcttataaataatcagtttcttccttatccatactatgctaagccagccgctgtgagatcccccgcacaaattttgcagtggcaagtattgtcaaataccgttcctgcaaagagctgccaagcccagcctacaacaatggcccgccacccacacccccacctttccttcatggcaattcctcctaaaaagaaccaagataagaccgagataccaactataaacaccattgcttccggtgaacccacctccactcccacaacagaggccgtggagagcaccgtcgctactttggaggatagtcccgaggtaatagaatcacctcctgaaatcaacacagtacaggttacttctaccgccgta

SEQ ID NO: 651 - DNA, 570 bp, synthetic construct
  source 1..570: mol_type = other DNA
atgatgaaatcattttttctggtagtgactattcttgctcttaccctgcctttccttggcgcacaagaacagaatcaagagcaaccaatcaggtgtgaaaaggacgaaaggttttttagtgacaagatagccaaatacatccctatacagtacgtcctctctcgctatccatcttacggactcaactactatcaacagaaacccgtggccttgataaataatcaattcttgccttatccctactacgctaaaccagccgcagttaggtcaccagctcagattcttcagtggcaggtactgagtaacaccgttccagccaagtcttgtcaagcccaacctaccacaatggcaagacatcctcatccccatctttcttttatggctattccacctaaaaagaatcaagacaaaactgaaataccaacaattaatactatcgctagtggcgaacccacatccacaccaaccacagaggccgtggaaagcaccgtcgctactctcgaggactcccctgaagtaatcgagagcccccctgagataaacaccgtccaagtgacctcaaccgccgtg

SEQ ID NO: 652 - DNA, 570 bp, synthetic construct
  source 1..570: mol_type = other DNA
atgatgaaatcctttttcctggtggtgacaatcctcgcactcacccttccctttctgggggcacaggagcaaaaccaggagcaacctatccgttgcgaaaaggacgaacgcttctttagtgacaagattgccaaatacataccaattcaatatgtattgagtaggtacccttcatacggtcttaactactaccagcagaagcctgtagcacttattaacaatcaatttttgccctacccttattatgccaagcctgccgctgtgcgtagccccgcacagattctccagtggcaagtcctgtccaacacagtccccgccaagtcttgtcaagctcaacccaccactatggcccgtcaccctcacccccacctgagtttcatggcaatcccccctaagaagaaccaggataagacagaaatcccaactataaatacaatcgcctctggggagcccacatccacacctacaaccgaggccgtggagagtacagtcgctactcttgaagatagcccagaggttattgagtcccctcctgaaattaacaccgtccaggtaacaagtaccgcagtt

SEQ ID NO: 653 - DNA, 570 bp, synthetic construct
  source 1..570: mol_type = other DNA
atgatgaagtcattctttcttgttgtgaccatcctggctctgacactcccctttctcggtgcacaagagcaaaatcaggagcaaccaattcgctgtgagaaagatgagcgtttcttttctgataaaatagctaagtacattcctatccagtatgtgttgtcaagatacccttcatacgggttgaactattaccagcaaaaaccagtagcccttataaacaatcaatttcttccatatccctactatgccaaacctgcagccgtcaggagtccagcacaaatcctccaatggcaggttctgagtaacacagtccccgctaagagctgtcaagctcagcctaccacaatggctcgtcaccctcatcctcacctttccttcatggcaataccccctaagaagaatcaagacaaaactgaaattccaactatcaatacaatagcatcaggagagccaacttcaaccccaactaccgaagctgtagaaagcactgtcgctactcttgaggacagtcctgaggtcatcgagtcaccccccgagatcaatacagtgcaagtgacctctacagccgtt

SEQ ID NO: 654 - DNA, 570 bp, synthetic construct
  source 1..570: mol_type = other DNA
atgatgaagagcttttttcttgtcgtgactattttggccttgactctgccattccttggtgctcaggaacaaaatcaggaacagccaatcaggtgcgaaaaagacgagcgcttttttagcgacaagatcgcaaagtatatccctattcagtatgtcttgtcacgctaccccagctacggtctgaattattaccagcaaaaacctgtagctcttattaacaatcagttccttccctatccttattacgccaaacctgcagcagtacgctcccctgcccagatccttcaatggcaggtcctctcaaatacagtaccagctaaaagctgccaggcccagcccacaaccatggcaaggcaccctcacccccatttgtcatttatggctattccaccaaaaaagaaccaggataaaaccgagattcccacaatcaacaccattgcttcaggcgaacccaccagcactcccacaaccgaagcagttgagtccaccgttgcaactctcgaagactcccctgaggtaatcgaatctccaccagaaattaataccgtccaagtgaccagtactgcagtt

SEQ ID NO: 655 - DNA, 570 bp, synthetic construct
  source 1..570: mol_type = other DNA
atgatgaagagtttctttctggtcgttactatactggctcttaccttgccctttctgggtgctcaggaacaaaaccaagaacaacctataaggtgcgaaaaagacgaaagattctttagtgacaaaattgctaagtatatcccaatccagtatgtcctttcaagataccccagctatggtcttaactactatcagcaaaaaccagtggcccttattaacaatcagttcctcccttatccttactacgccaagccagccgcagttaggagccctgctcaaattctccaatggcaggtcctgagcaacactgtccccgccaagagctgtcaggcacagcccactacaatggccaggcacccccacccacatctctcattcatggccatacccccaaaaaaaaatcaagacaaaactgaaatacccaccataaacacaatcgcatcaggtgaacctacaagcacaccaacaacagaggcagtagaatcaactgtcgctacacttgaagatagtccagaggtaattgaaagtcccccagaaataaatacagtgcaagtgacttctaccgccgtg

SEQ ID NO: 656 - DNA, 570 bp, synthetic construct
  source 1..570: mol_type = other DNA
atgatgaaatcattctttcttgttgtgaccatattggcacttaccctccccttcttgggcgcacaggaacagaaccaggaacaacctattaggtgtgagaaagatgagcgtttcttctcagacaaaatagctaaatatattccaatacagtatgttctgtcacgctaccctagctatggactgaattattatcagcagaaacccgtcgcacttataaacaatcagttcctgccttacccttattacgctaagcctgctgctgtgcgtagtcctgcccaaatcttgcagtggcaggtgttgagtaataccgtgcccgctaagagttgtcaagcccaacccactacaatggcccgtcatccacatcctcatctgtcttttatggctatacctcccaagaaaaaccaggacaagaccgagatacctacaattaataccattgcctcaggagaacctacttccactcccacaacagaggcagtggagagtaccgttgcaacattggaagacagtcctgaggttatcgaaagccctcccgagataaatactgtgcaggttacatccaccgccgta

SEQ ID NO: 657 - DNA, 570 bp, synthetic construct
  source 1..570: mol_type = other DNA
atgatgaaatccttcttccttgtcgtgacaatacttgcattgacacttccctttctcggggcacaggaacagaatcaagagcaacccattcgctgtgagaaggacgaaaggtttttctcagataagatagcaaaatatatacccatacagtacgtcttgtccagataccccagctatggacttaactattatcagcagaagccagtagctctcatcaacaatcaattccttccctacccttactacgcaaaaccagcagccgtgcgctctcctgcacaaatcttgcagtggcaggtattgagtaatactgtacctgcaaaatcttgtcaggcacagcccaccacaatggctaggcaccctcacccccacctcagttttatggctatacccccaaaaaagaaccaggataaaaccgaaataccaaccattaataccattgcatccggggagccaaccagcacccccaccaccgaagctgttgaatccactgttgcaaccctggaagattctcccgaggtaatagaaagtccaccagagatcaacaccgtgcaagtgacaagtacagccgta

SEQ ID NO: 658 - DNA, 570 bp, synthetic construct
  source 1..570: mol_type = other DNA
atgatgaagagttttttccttgtcgtaaccattcttgctcttaccctcccttttctgggagcccaggaacagaaccaagagcagcctataagatgcgaaaaggacgaaagattcttctcagataagatcgccaaatatatccccatccaatatgtcttgtcccgttaccccagttatggcctgaattattaccagcaaaaacccgtggcactcatcaacaaccagttcttgccttacccttattatgctaaacccgcagcagtccgcagcccagcacaaattttgcagtggcaagttttgtccaacacagttcccgccaaaagctgccaagcacagcccactacaatggctcgtcatcctcaccctcacttgtcttttatggcaattcctcccaagaagaatcaggacaaaactgaaattccaacaattaacacaatagcatcaggcgagccaacttctactccaactacagaggctgtggagtccaccgtggctacactcgaagatagccccgaggtgattgaatcccctcctgaaattaacaccgtccaagtgaccagcaccgccgtc

SEQ ID NO: 659 - DNA, 570 bp, synthetic construct
  source 1..570: mol_type = other DNA
atgatgaaaagtttctttctggtagtgaccatactcgctttgacattgcccttcttgggggctcaagaacagaatcaagagcagccaattcgctgcgaaaaagatgagcgcttcttttctgataagatcgctaagtacatacctatccaatacgtgctctcaaggtacccaagctacgggctcaactattatcagcaaaaacctgtagcattgataaacaatcagttcttgccatacccttattacgcaaagccagcagccgtcaggtcccctgctcaaatcttgcagtggcaggttctgtcaaacactgtccccgccaaatcatgccaagctcaacctactacaatggcaagacacccacatccccacttgtcctttatggctattccccctaaaaagaaccaggacaagaccgaaatacccaccataaatacaatagcttctggggaacctacaagcaccccaacaaccgaggctgtcgaaagcactgtagctactcttgaagattctcccgaggtaatagagagtcctcccgaaatcaatacagttcaagtaacatctacagcagtg

SEQ ID NO: 660 - DNA, 570 bp, synthetic construct
  source 1..570: mol_type = other DNA
atgatgaagagctttttcctggtagtcactattcttgctcttacattgccatttctgggtgctcaggagcagaaccaggagcaacctatcaggtgcgaaaaagatgagcgttttttctccgataagattgccaagtatattcctatccaatacgtcctttcccgttacccatcctacggacttaactactaccagcaaaaacctgtcgccctgattaacaatcaattcctcccctatccctactacgccaaacccgccgccgtaaggtcccctgctcaaatcttgcaatggcaagttctttcaaatacagtcccagcaaaaagttgtcaggctcagcctactactatggcccgccatccccatccccaccttagtttcatggctattccccctaagaaaaatcaggacaagactgaaattcccactatcaacactatcgcctctggagagccaacctctactcccactacagaagccgtagaaagcacagtggcaactctggaagattccccagaggtaatagaatctccacccgagattaacaccgtacaagtgacttcaaccgctgtg

SEQ ID NO: 661 - DNA, 570 bp, synthetic construct
  source 1..570: mol_type = other DNA
atgatgaaatcattttttcttgtggttaccatccttgcccttacactgcctttcctgggtgctcaggaacagaaccaggagcagcccattagatgtgaaaaggatgaacgcttcttctccgacaagatagctaagtatattcccattcaatacgtcttgtctcgctacccaagctatggcctcaattattatcagcaaaaaccagtagctctgatcaacaatcaatttcttccctacccctactacgcaaaacctgcagccgttcgtagtcccgctcaaattctgcaatggcaggtgctttcaaacactgtaccagctaaaagctgccaggcacaacctactactatggctcgccacccacatccccacctttcattcatggcaatccccccaaagaaaaaccaggacaaaacagaaataccaactatcaacactatcgcctctggagaaccaaccagcacccccacaaccgaagcagtcgaatccacagtagctactctggaggactcacctgaggtcatagagtctcctcccgagataaatactgtgcaagtgacatccacagcagtt

SEQ ID NO: 662 - DNA, 570 bp, synthetic construct
  source 1..570: mol_type = other DNA
atgatgaagagtttttttctggtcgtcaccatactcgccttgactctccctttccttggcgcacaggaacaaaatcaggaacagcctattcgttgcgagaaagacgagcgctttttttctgacaaaatagctaaatatatcccaattcagtatgtattgtcacgctatcccagctacggtcttaattattatcaacaaaagcctgtagctctgattaacaatcagttccttccttacccctattatgcaaaacccgccgcagtgcgctcacctgctcagatcctgcagtggcaagtattgtctaataccgttcccgctaagtcttgtcaggctcagcccacaactatggcacgccacccacacccccatctctctttcatggctatccctcccaaaaagaaccaggacaaaacagagatacccactataaacactatcgctagcggtgaacctacaagtacaccaacaactgaagccgtagaaagtaccgttgctacacttgaagactcccctgaggtaatagagagtccccctgaaatcaacaccgtacaagttacttctactgctgtg

SEQ ID NO: 663 - DNA, 570 bp, synthetic construct
  source 1..570: mol_type = other DNA
atgatgaagagtttttttcttgttgtaactatactcgcactcacactgccatttcttggagcacaagagcagaatcaagaacaacctattcgctgtgagaaggatgagcgtttcttctccgacaagattgccaagtatatacctatccagtatgtcctttccaggtatcctagctatgggctcaactactaccaacaaaagccagtggccttgatcaataatcaatttttgccttatccttattatgccaaacccgctgcagttcgctcaccagcccagatacttcaatggcaagtcctgtcaaataccgtcccagcaaagtcctgtcaagcccaaccaactacaatggccaggcacccccacccccacctgtcattcatggcaatccctccaaagaaaaatcaggataagactgaaatccctaccattaacacaatcgcttcaggcgagccaacttcaacccctacaaccgaggcagtcgagagtactgttgccacactcgaagactcacccgaagttatcgagagcccccctgaaattaacacagtacaggtaactagcaccgctgtt

SEQ ID NO: 664 - DNA, 570 bp, synthetic construct
  source 1..570: mol_type = other DNA
atgatgaaatccttttttttggttgtcactatcttggcattgacacttccattcttgggtgcccaagagcaaaaccaagaacagcctattaggtgtgaaaaggatgagaggtttttctcagataagatagctaagtacatacctatacagtatgtgttgagtcgctacccttcttacggactgaactattaccagcaaaagcctgtggcactcatcaataatcagtttcttccctatccttattatgccaagcctgctgccgtgcgttctcccgctcaaatcttgcagtggcaagtgctctctaacaccgtgcccgccaagtcatgccaggcccagcccacaactatggctcgtcatccacatcctcacttgagctttatggcaatacctcccaaaaagaaccaggataagactgaaatccctacaatcaacactattgcaagcggtgagccaacctctacccctactactgaggcagtcgagtccacagtggccactttggaggacagccccgaggttattgagagcccacccgaaataaacactgttcaagtaacttccacagcagta

SEQ ID NO: 665 - DNA, 570 bp, synthetic construct
  source 1..570: mol_type = other DNA
atgatgaagtccttctttcttgtagtcacaattctcgccctgactctccctttcctgggggcacaagaacagaaccaagagcaacccatacgctgcgaaaaggatgagagattttttagtgacaaaatcgcaaagtatattccaatccagtacgttctcagccgttacccctcttacggtcttaactattaccagcaaaagccagtcgcactcataaataatcagttcctgccctacccatattatgccaagcctgccgccgttcgctcacccgcccaaatattgcaatggcaggtactgagtaacaccgttcctgccaaatcatgccaggctcagccaactactatggctcgccacccccaccctcacctcagtttcatggctataccccccaagaagaaccaggacaaaacagagattcccacaattaacactattgcatctggggagcccaccagcacccctacaactgaagcagtcgaatccacagtagctaccctggaggactccccagaagttatcgagtctcccccagaaatcaatactgtgcaagtaacctcaactgccgtt

SEQ ID NO: 666 - DNA, 570 bp, synthetic construct
  source 1..570: mol_type = other DNA
atgatgaaaagtttctttcttgtcgtgacaattctcgccttgactctgccattcttgggagcacaggagcagaatcaggaacagccaatcaggtgtgaaaaagatgaaaggttcttctccgataagatagcaaaatatatacccatccagtacgtgctcagtaggtatccaagctatggactgaattattaccaacagaagccagtggcactcatcaataaccaatttcttccatatccatactacgctaagcccgccgccgtgagaagccccgcacagatactccagtggcaggtcctttccaatacagtacctgctaagagctgccaagctcaacccaccacaatggcacgccatcctcaccctcatttgagttttatggcaattccacctaagaaaaaccaggataagactgaaataccaaccataaataccatagcaagtggtgagcctactagtacacctacaactgaagctgtagaatctaccgttgctaccttggaggatagccccgaagtcatcgagtctccacctgagataaacactgttcaagttacctccactgccgtg

SEQ ID NO: 667 - DNA, 570 bp, synthetic construct
  source 1..570: mol_type = other DNA
atgatgaagagcttcttcctcgtggtcactatcctggcattgaccctgccatttttgggggcacaagaacagaaccaagagcaacctattaggtgcgagaaagacgagaggttcttctctgacaaaatagctaagtacatacctatccagtatgtgctttcacgctacccaagttatggacttaactattatcagcagaagccagtagctttgataaacaatcaattcctcccttatccttactacgcaaagcctgctgcagtcagaagccctgcccagatactgcaatggcaagtgttgtcaaatactgtccctgctaaaagctgtcaggcccaacctactactatggctcgccatccacatccacatctgagcttcatggccatccccccaaagaaaaatcaggacaagaccgaaataccaaccatcaatactatagcatccggtgaacctacatctacccctaccaccgaagccgtcgaaagtacagtggcaacactggaagatagtcctgaagtaattgaatcccctcctgagataaatacagtgcaggtcacttctaccgccgta

SEQ ID NO: 668 - DNA, 570 bp, synthetic construct
  source 1..570: mol_type = other DNA
atgatgaagagcttctttctcgtcgtaactatattggctcttacacttccattcttgggtgcccaggagcagaaccaggaacagccaatccgctgcgaaaaagatgaaagattcttctctgacaagatcgctaaatatatacctatccagtatgtacttagtaggtatccctcatacggacttaactactatcaacagaagcctgtagcactgataaacaatcagttccttccatatccctattatgctaaaccagccgccgtgcgttctccagcccagatacttcagtggcaagtactgagcaacactgttcccgctaagagctgtcaggctcaacccactactatggcaagacacccacacccccacctcagctttatggctattccccctaaaaaaaatcaggataaaactgaaattcccactatcaacactattgccagtggcgagccaacttcaacacccactactgaggctgtcgagagtacagttgccactctcgaggatagtccagaagttatagagagcccacctgagataaatacagtgcaagtgaccagtacagcagta

SEQ ID NO: 669 - DNA, 570 bp, synthetic construct
  source 1..570: mol_type = other DNA
atgatgaaatcattcttcctggttgttacaatcctggccctcacactccctttcttgggtgcccaggaacaaaaccaggagcagcctatcagatgtgagaaagatgaacgctttttttctgataagatagctaagtatatccccattcagtacgtgctgtcacgttatcctagttatggtctgaactactatcaacaaaagcctgttgctctgataaataatcaatttcttccctacccatattatgccaagccagccgctgtgcgctccccagctcaaattcttcaatggcaagttctttctaataccgttcccgctaagtcctgtcaagcccaacccaccaccatggctcgtcacccacacccccatctcagtttcatggctattccccccaaaaaaaaccaagataagacagaaatcccaaccattaacacaattgcttctggagaacccacctcaacaccaacaaccgaagcagttgaaagcactgtggcaactttggaagatagcccagaggttatcgagagcccacccgaaatcaataccgttcaagtaacttccacagcagta

SEQ ID NO: 670 - DNA, 570 bp, synthetic construct
  source 1..570: mol_type = other DNA
atgatgaaatccttttttttggtagtcaccatactggcccttaccctcccttttctcggagcccaggaacagaatcaggaacagcctatacgttgcgagaaagatgaacgttttttctctgacaaaattgcaaaatacattcctattcaatacgtccttagcaggtatccaagctatggccttaactactaccaacagaagcctgttgcacttataaataatcaatttctcccatatccatactatgcaaaacccgctgccgtaagaagtcccgcacaaattcttcaatggcaagtgctcagtaacactgtacctgccaagagttgccaagcccagcccacaactatggcccgtcaccctcaccctcatttgagttttatggctatcccacccaagaagaatcaggacaagaccgagattcccactattaacaccatagcaagcggagaaccaacctcaactcccacaaccgaggctgtagaatcaactgttgccacactggaggactcccccgaagtaatagaaagtcctcctgagataaacaccgtacaagttacctctaccgcagtg

SEQ ID NO: 671 - DNA, 570 bp, synthetic construct
  source 1..570: mol_type = other DNA
atgatgaaatctttttttctggtggtaactattctggcattgaccctccccttcttgggggcacaggaacaaaatcaggaacagcccatcagatgtgagaaggacgaacgctttttctccgataaaatcgctaaatatataccaatccagtacgttctttcccgttacccatcctacggtctgaattactatcaacaaaaacctgtggcactcatcaataaccaattccttccctacccttattacgctaagcccgctgccgtccgttcacccgcacagatcctccagtggcaagttctctcaaatactgtacccgctaaatcatgccaggcacaacccacaactatggctcgtcacccccatcctcacctttcctttatggcaattccaccaaaaaaaaatcaagacaaaacagaaatccctacaatcaacacaatcgcctcaggagagccaacatccactccaaccaccgaggctgtcgagtcaactgtggcaaccctggaggattcccctgaggtgattgagagtccacccgagattaacacagtgcaggtaacctccacagcagtt

SEQ ID NO: 672 - DNA, 570 bp, synthetic construct
  source 1..570: mol_type = other DNA
atgatgaaatcatttttcttggtagttaccattcttgcccttactctcccttttttgggtgcccaggaacagaaccaggagcaacctatcagatgtgagaaggacgaaagattttttagtgataaaatagctaagtatatacctatacagtacgtcctgtcacgttacccttcctacgggcttaactactatcagcagaagccagttgcactcataaacaaccaattcctgccttatccatactatgcaaagcccgcagctgtccgttcacctgcacagatcctccaatggcaagtgttgagtaatactgttccagccaaatcttgtcaggcacagcctactactatggctaggcacccacacccccacctgtcattcatggctattcctcccaagaaaaaccaggataagacagagattccaactatcaataccattgcatcaggcgagcccacaagcacccccaccacagaagccgtggagtccactgttgccactcttgaggatagtccagaggtcatcgagtccccacccgaaattaacaccgtccaagttacttccaccgccgta

SEQ ID NO: 673 - DNA, 570 bp, synthetic construct
  source 1..570: mol_type = other DNA
atgatgaagtccttttttcttgttgttaccatcttggcattgactttgcctttcctcggggcacaggaacaaaaccaagaacaacccatacgttgtgaaaaggacgaaaggtttttctcagacaagatagctaaatacatacccatccagtatgtactgtcacgttacccctcttacgggctgaactattatcaacaaaagccagtagccctgataaacaatcaattccttccttatccttactacgccaaaccagccgcagtccgtagcccagcacagatattgcagtggcaggtactgtccaataccgtccctgcaaagagttgtcaggcacagcccacaactatggctagacaccctcacccacacctgtcctttatggccattccaccaaagaagaatcaagataaaactgagattcccaccatcaatactatagcaagcggcgagccaactagcacccctaccaccgaggctgtcgaatctacagtagctactctcgaggattctcccgaagtgatcgagagccctcccgagataaacactgttcaagtaacatccactgctgtc

SEQ ID NO: 674 - DNA, 570 bp, synthetic construct
  source 1..570: mol_type = other DNA
atgatgaagagctttttcttggtcgtaactattctggccttgacactccccttccttggggcacaagagcaaaatcaagaacagcccattcgttgcgagaaagacgagcgtttttttagtgacaagatagccaaatacatacctatacaatacgtcctgtcacgttatccatcttacggattgaactactaccagcaaaaacccgtggccctgatcaataaccaatttttgccctatccatattacgccaaaccagctgccgtcaggagtcccgcacagatccttcagtggcaagttttgagtaacaccgtaccagccaagtcttgccaagcccagccaaccacaatggccagacatccacacccacacctcagctttatggccatcccacccaagaaaaaccaggacaagactgaaatccccaccatcaataccattgccagtggcgagcctacttctacccccactactgaagccgtagaatcaaccgtcgctaccttggaggactctccagaggttatcgagagtcccccagagataaacactgttcaggttacatctaccgccgtc

SEQ ID NO: 675 - DNA, 570 bp, synthetic construct
  source 1..570: mol_type = other DNA
atgatgaaatctttcttccttgtcgttacaattttggcactcactttgccctttcttggtgctcaggagcagaatcaagaacaacccatacgttgcgagaaagacgaaagatttttctctgataaaatcgcaaagtacatacctatacaatatgtcctcagccgttaccctagttacggcctgaactactatcagcagaaacccgtcgctttgatcaataatcaattccttccatacccatattatgccaaaccagccgccgtcagatctcctgctcagattttgcagtggcaagtcctctctaatacagtccccgccaagagttgccaagcccagcctacaacaatggccagacacccccaccctcacctcagcttcatggctatacctcccaaaaagaaccaagataaaactgagataccaactatcaacactatcgcttcaggcgagcctacctccacacccaccactgaggccgtagagtctaccgtagcaaccctcgaagattcacctgaggtgatagaatccccacccgaaatcaacacagtccaagtaacctcaacagccgtg

SEQ ID NO: 676 - DNA, 570 bp, synthetic construct
  source 1..570: mol_type = other DNA
atgatgaaaagtttcttcctggtcgtgaccattcttgctttgaccctcccctttctgggtgctcaagaacagaatcaggaacagccaataaggtgcgaaaaggacgagaggtttttcagtgacaaaatcgcaaagtatattccaatccagtacgtgctctcccgctacccatcttacgggctcaattattatcaacagaagcccgtagccttgatcaacaatcagttcctcccatatccttactacgccaagcctgccgctgtccgtagcccagctcagatacttcaatggcaagtgctctctaatacagtccctgctaaatcctgccaagcccagccaacaactatggcaagacatccacacccacatctgtcatttatggcaattccacctaagaagaaccaagataagactgagattcctacaataaacaccatagcatctggggaacccacatctacccccaccactgaggctgttgaatcaacagttgccacattggaggacagtccagaagttatagaatctccaccagaaatcaataccgtacaggtaacctcaactgccgtg

SEQ ID NO: 677 - DNA, 570 bp, synthetic construct
  source 1..570: mol_type = other DNA
atgatgaagtccttctttcttgtcgtgactatactcgctcttacactccccttcttgggtgctcaggagcaaaatcaggagcagccaattcgttgcgaaaaggacgaaagatttttttcagataagatagccaaatacattcctattcagtacgtccttagccgttatccaagctatggcctgaattattatcaacaaaagcccgtggctctcatcaataatcaatttctgccctatccatactatgccaaacctgccgcagtccgttcccccgctcagatcctccagtggcaggtgctgagtaataccgtacctgctaagagctgccaagcacagccaacaactatggcaagacatccacacccccatctgtcatttatggctatacctcctaagaagaaccaggataagaccgagattcccacaataaataccattgcatcaggtgaaccaacctccactcctaccacagaagcagtcgagtcaactgtcgctactttggaggacagtcccgaggttattgagagcccccccgagattaacactgtccaggtcacaagcactgcagta

SEQ ID NO: 678 - DNA, 570 bp, synthetic construct
  source 1..570: mol_type = other DNA
atgatgaagtcttttttcctggttgtcactatcttggccctcaccctcccctttctcggtgctcaggagcaaaaccaagagcaaccaatacgctgtgaaaaggacgaacgcttcttttctgacaaaattgccaagtacattccaattcagtatgtgttgagccgttacccctcctatggactgaactattaccagcaaaagcccgttgccctgataaataaccaattcctcccttatccctattatgctaaaccagcagccgttcgtagtcctgctcagatacttcaatggcaagtgctgtccaatacagtgcctgcaaagagctgtcaagctcagcctacaactatggctcgtcatcctcatcctcatctttccttcatggctatcccccctaagaaaaaccaagacaaaaccgagatacctaccataaataccatcgcttctggggaacctacaagcactcccacaactgaagccgtcgaatctacagtcgccacccttgaggattcccctgaagttatcgaatcaccacccgagattaatacagtgcaagtaacatccacagccgta

SEQ ID NO: 679 - DNA, 570 bp, synthetic construct
  source 1..570: mol_type = other DNA
atgatgaaatctttctttctggtagtaaccattcttgcattgaccttgccatttctgggcgctcaagagcaaaaccaagagcaacccatacgctgtgagaaagatgaacgtttcttcagcgataaaattgccaagtacatcccaatccaatacgtcctttcaagatatccttcctatggcctcaactactaccaacagaaacccgtagccctgataaacaaccagtttttgccctatccttactacgccaaacctgctgctgtgaggtctcccgctcaaattttgcaatggcaagtactttcaaacaccgtcccagccaaatcatgccaagcccaacctactactatggctaggcacccccacccacacctgtctttcatggcaatccctcccaagaaaaatcaggacaagactgagattcctaccatcaatactattgcctctggagagcctacctctactccaaccactgaggcagtagaatccaccgtggctacattggaggattcacctgaggtgatagagtctccccctgagataaacacagttcaggttacttcaaccgccgta

SEQ ID NO: 680 - DNA, 570 bp, synthetic construct
  source 1..570: mol_type = other DNA
atgatgaagagtttttttcttgtagtcactattctggcactcacattgccctttcttggagcacaggaacaaaaccaagagcagcctattcgctgcgaaaaggacgagcgttttttcagcgacaagatagctaaatacatacctattcagtatgtgctgtccagatacccaagttacggactcaattactatcaacagaaacctgtagccctcatcaataatcaatttctgccctatccctattacgcaaagcccgcagcagtgaggagccctgcccagatacttcaatggcaagtcctttctaacactgtgcctgctaagtcctgtcaggcccagcctactactatggctaggcacccccatccacacctgagtttcatggcaattcctccaaagaagaatcaggataagaccgaaataccaactatcaatactattgcatcaggcgagcctactagcacccccaccaccgaagcagttgaaagtactgtagcaactctcgaggacagtcccgaagtgatagagagccccccagagatcaatacagtacaagttacttccacagcagta

SEQ ID NO: 681 - DNA, 570 bp, synthetic construct
  source 1..570: mol_type = other DNA
atgatgaagtctttctttctcgtagttactatattggccttgaccttgccatttcttggcgcacaagagcagaatcaagaacagcctatacgttgtgagaaagatgaaaggttcttttctgacaagattgctaaatatatacccattcaatacgtcctgtcacgttatccaagttacggattgaactactatcaacaaaagcccgtagccctgataaataatcagtttctgccatacccttattatgcaaaaccagctgcagtcagatcaccagcccagattctccagtggcaggtacttagtaatactgttccagcaaagagttgccaagctcaacccacaacaatggctcgccacccacacccccacctctcatttatggctatcccccccaaaaaaaaccaggataagacagaaatacccaccataaacactatcgcttctggtgaaccaaccagcacaccaaccacagaagctgttgaatcaactgtagcaactctcgaggattcacctgaggtgattgagagtcctcccgaaataaataccgtccaagttacctctactgctgta

SEQ ID NO: 682 - DNA, 570 bp, synthetic construct
  source 1..570: mol_type = other DNA
atgatgaagagtttcttcctcgtggtcactattctcgcactcacccttccttttcttggagcccaagagcaaaatcaggaacagcccatccgttgtgagaaagacgaaagattcttttctgataaaatcgcaaagtatataccaatccaatacgtgttgtctcgctatccatcatacggactgaactattatcaacagaaacccgtagccctgattaataaccagttcctgccctacccctactacgcaaaaccagcagccgtccgctccccagcccaaattttgcaatggcaggttctctccaatacagtcccagccaaatcctgtcaagcacagccaaccactatggcacgccatcctcatccacacttgtcattcatggctatcccaccaaagaaaaatcaagacaagacagaaataccaactatcaacactattgcatctggggaacccacatctactccaactactgaagcagtcgagagtaccgtcgcaactctggaagactcccctgaggtaatcgagagtccccctgaaattaataccgtgcaagtcacctctacagccgtt

SEQ ID NO: 683 - DNA, 570 bp, synthetic construct
  source 1..570: mol_type = other DNA
atgatgaagagtttttttttggtcgtgaccattctcgcactcactcttcctttccttggcgcccaagagcaaaatcaggagcaacctatcaggtgcgagaaggatgagcgttttttttcagataagattgcaaagtacattcctatccaatatgtcttgagtcgttacccatcttatggcttgaattattatcaacagaaacctgttgccctcattaataaccaattccttccttacccatattatgccaagcctgccgctgtacgctcacctgcacagatactgcagtggcaagttctgtctaataccgtcccagctaaaagttgtcaggcccaacctacaactatggcaagacacccccatccccatctgagttttatggctataccacccaaaaagaaccaagataaaactgagattcctacaataaacacaatagcttcaggcgagccaacctcaactccaactaccgaggctgtggagtcaaccgtcgctactcttgaagatagcccagaagtcatagagagccctcctgaaataaacactgtccaggttacttccaccgcagtg

SEQ ID NO: 684 - DNA, 570 bp, synthetic construct
  source 1..570: mol_type = other DNA
atgatgaagagcttcttcctcgttgttaccatccttgcactcactctcccctttctgggagctcaagagcagaatcaagagcaacccatacgttgcgagaaggacgaaaggttctttagtgataaaatcgctaaatatatccccatacaatacgtgctctccaggtatccttcttatggcctgaactattatcaacaaaagcctgttgcattgataaataatcaatttttgccatatccttactatgctaagcctgctgccgttcgctcacctgctcaaatcctccagtggcaagtactcagtaataccgtgcctgccaagtcctgtcaagcccagcccactactatggcacgccatccccatcctcatctctcatttatggccatcccacccaaaaaaaaccaagataagaccgaaattcccacaataaacacaatagcttcaggtgagcctacatctaccccaacaaccgaagccgtagaatccactgtagctacccttgaagacagtcccgaggtcattgaaagtccacccgaaatcaacactgtccaggtgacaagcacagctgta

SEQ ID NO: 685 - DNA, 570 bp, synthetic construct
  source 1..570: mol_type = other DNA
atgatgaagtcattctttcttgtggttactatccttgccttgacactgccattcctgggggcacaagaacagaatcaggagcaacctatcagatgtgaaaaagacgaacgcttctttagtgataagattgctaagtatatccccatacagtatgtcctttccaggtatcccagttatggattgaactattaccaacaaaaacccgtggctctgataaacaatcagtttctgccctatccatactatgcaaagcctgcagctgtcaggagcccagctcagattttgcagtggcaagtgctgtccaacacagtgcccgcaaagagttgccaagctcagcctacaactatggctcgccacccacatcctcatctcagtttcatggctatacctccaaagaaaaaccaagataaaactgagatcccaacaataaatacaatcgcttctggagaaccaaccagtacccccactactgaggccgttgaaagtaccgtagccaccttggaggatagccctgaagtgattgagagtccacctgagattaacactgttcaggtcacatccaccgcagta

SEQ ID NO: 686 - DNA, 570 bp, synthetic construct
  source 1..570: mol_type = other DNA
atgatgaagtccttttttcttgtcgtcactatactggccctcactctgcccttcttgggagcccaagagcaaaaccaggagcaaccaataaggtgcgagaaggatgagcgcttcttcagtgataaaatagccaaatatatccccatacagtatgtcctgtcccgctatccatcttacggtctcaactattaccagcagaagcccgtggcactgataaacaaccagttcctcccttatccttattacgcaaaacccgccgctgttagatcacctgcccaaattctgcaatggcaggtcctctcaaacacagtgcccgctaaatcttgccaagcacagccaacaacaatggcaaggcatcctcaccctcacctgtcatttatggcaataccacctaaaaagaaccaagataagactgagatccctaccatcaacaccatcgctagtggggaacctacaagtacacccactactgaggctgtcgagtctacagtggccacccttgaggattcaccagaagtcatcgaaagcccacccgaaataaacaccgtacaggtgacatctaccgctgta

SEQ ID NO: 687 - DNA, 570 bp, synthetic construct
  source 1..570: mol_type = other DNA
atgatgaagagtttcttcctggtggttactatcttggcccttactttgcctttcttgggtgctcaagaacaaaaccaagagcagcccatcagatgcgaaaaggatgagagattcttcagcgataagatcgcaaagtacattccaattcagtatgtgctgagccgttatccttcatacggtttgaactactaccaacagaagccagtcgcacttatcaacaatcaattcctgccatacccttactatgccaaaccagccgccgtgcgttctcctgcccaaattctccagtggcaagtgctgtccaacacagtacccgccaaatcctgccaggcacagccaaccacaatggctcgtcatccacacccccatctctcttttatggcaataccacctaaaaagaaccaggataagaccgaaatacctacaatcaacaccatcgcatcaggggaaccaactagcacccctacaacagaagcagtcgaatctacagtggcaacactcgaggactctccagaagtgattgaatcaccacctgagatcaacactgtccaagtaactagcacagccgtt

SEQ ID NO: 688 - DNA, 570 bp, synthetic construct
  source 1..570: mol_type = other DNA
atgatgaagtccttctttcttgttgttacaatcctggcccttacccttcctttcttgggggctcaggaacagaaccaggagcaacctatccgctgcgaaaaggatgagcgctttttcagcgacaagatcgccaaatacatacccatccaatatgttctcagtagatacccatcttacggcttgaactactaccagcagaaacccgtagcattgataaacaaccaatttttgccatatccctattatgccaaacctgccgctgtccgctcccctgcacaaattctccagtggcaggttctttctaacactgttcctgcaaaatcttgtcaagcacagcctaccacaatggcccgccatcctcatcctcacctttcattcatggctataccacccaaaaagaatcaggataaaacagagatacctactatcaacactattgcatcaggggaacccacatcaactccaactaccgaggctgtggagtcaactgtcgctaccttggaagatagccctgaagttatagagtcaccacctgaaataaatactgtgcaggtcacatcaacagcagta

SEQ ID NO: 689 - DNA, 570 bp, synthetic construct
  source 1..570: mol_type = other DNA
atgatgaaatcctttttcctggtcgtgacaatcttggccttgactctcccttttcttggggctcaagagcagaaccaggaacaacctataagatgtgaaaaagacgagagatttttctcagacaagatagccaagtatatacctatccaatatgtgctgtcacgttatccatcatacggcctcaactactatcaacaaaagcctgtcgccctcattaacaaccaattcttgccctatccatactatgcaaaaccagcagcagtaagatcacctgcccaaattctccagtggcaagttctgtcaaacacagtaccagctaaaagctgtcaggctcagcccacaacaatggcacgtcacccccacccacacttgtccttcatggccattcctcctaaaaaaaaccaagataaaacagaaattcccacaatcaatactatcgcctctggtgaaccaacttccacacccaccactgaagcagtagagagcaccgttgccactctggaagatagtcccgaggtgatagagtcacccccagaaataaacacagtgcaagtcacttcaacagccgtt

SEQ ID NO: 690 - DNA, 570 bp, synthetic construct
  source 1..570: mol_type = other DNA
atgatgaagtcattctttcttgtagtcactatccttgcccttacattgcctttccttggggctcaggaacagaatcaagaacaacctatccgttgtgagaaagacgaacgttttttcagcgacaagattgccaagtatatccctattcagtatgttctctctcgttatccatcctacggtctgaactactatcaacaaaagcctgttgctctgattaataatcagtttttgccatatccttactatgctaagcctgcagcagtacgctcccctgctcaaatccttcaatggcaagtgcttagcaataccgttcctgcaaagtcatgtcaggcccaaccaaccaccatggcccgccatcctcacccacatctctctttcatggccattccccccaagaaaaaccaagataagaccgaaatacctactatcaatacaatagcatcaggcgagcctacaagcacaccaacaactgaagctgttgagtccactgtggccacacttgaggactcccctgaggtcatcgagtccccccctgaaattaatacagttcaggtcacttccacagcagtc

SEQ ID NO: 691 - DNA, 570 bp, synthetic construct
  source 1..570: mol_type = other DNA
atgatgaagtcattctttttggtagtaaccattcttgctttgactctgcccttcttgggcgctcaagaacagaaccaagagcagcctattcgctgtgagaaggacgagagattcttctctgacaaaattgccaagtatatccccattcaatacgtcttgtcacgttacccctcatacggtctgaattactaccagcagaaacccgtggcactgattaacaatcagttcctgccatatccatactacgccaaaccagcagccgtgcgttctcccgcccaaatcttgcaatggcaagtactcagtaacacagtcccagcaaaatcttgtcaagcccaacctactacaatggcccgccatccacaccctcatttgagttttatggcaattccaccaaagaaaaaccaggataagactgaaattccaaccattaacacaatcgcaagcggggaaccaacttcaacacccaccacagaagccgtcgaatccactgtagccactctggaagattcaccagaggtcattgagtctccccccgagattaatactgtccaggtaacttcaaccgccgtt

SEQ ID NO: 692 - DNA, 570 bp, synthetic construct
  source 1..570: mol_type = other DNA
atgatgaagagcttctttctggttgttacaattctcgcccttacactcccctttctcggtgcccaagaacaaaatcaagagcaacccataagatgtgagaaagacgagcgtttcttctccgataagatagctaagtacattccaatccagtatgtgttgtcaagatacccctcttacggtctgaactattatcaacagaaacctgtggcccttataaataatcaatttctcccctatccatattacgccaagccagccgccgtgcgtagccccgcacagatcctccaatggcaagtattgagtaacactgtcccagcaaagtcatgccaggctcagcccacaactatggctagacacccacacccacacctcagcttcatggcaatccctcccaagaagaaccaggacaaaactgaaatacccaccatcaacaccattgcctccggcgagcccacttccacaccaactactgaagccgttgagtccaccgtagccaccctggaagactcccctgaagtaattgagtctcctcccgagataaacacagttcaggttaccagcaccgctgtc

SEQ ID NO: 693 - DNA, 570 bp, synthetic construct
  source 1..570: mol_type = other DNA
atgatgaagagtttctttcttgtggtgactatattggcactgacactccccttcctcggggctcaagagcagaaccaggaacagcccattcgctgtgagaaggatgaacgcttcttcagcgataagatcgcaaaatacattcccatccagtatgttcttagccgttatccctcatacgggctgaattactatcaacagaaacccgtcgctctcataaataaccagttccttccttatccttattatgctaagcctgccgctgtacgctctccagcacaaatacttcagtggcaagtgctttcaaatactgtgcccgcaaaatcctgtcaggctcagcctaccacaatggccaggcacccacatccacatctctcctttatggcaatcccccctaaaaaaaatcaggataagaccgaaatacccaccataaacaccatagcatctggtgagcctacttccactcccaccactgaggctgtcgagtccactgtggccacactggaggattcacctgaggttattgagtccccccctgagatcaacacagttcaggtaacctcaaccgcagtt

SEQ ID NO: 694 - DNA, 570 bp, synthetic construct
  source 1..570: mol_type = other DNA
atgatgaaatcattttttctggtggttactattttggcactgacactgccttttctgggggcacaggaacaaaatcaggagcagcctataagatgcgaaaaagacgaacgtttcttttctgacaaaatcgccaaatacatacccatccaatacgtgctgtcccgctatccaagttacggtctcaattattatcagcagaagccagttgcacttatcaataaccaattcttgccttatccctattacgccaaacccgccgcagtccgctcccccgcccagatattgcaatggcaagtactttcaaatacagtgcctgctaagagctgtcaggcccaaccaactactatggcaaggcatccccacccacacctgtcctttatggctatccccccaaagaagaatcaggacaagaccgagatccccaccatcaacacaatcgcatccggcgagcccactagtactcctaccaccgaggccgtagaaagcacagtggcaaccctggaagatagtccagaggtgatagaatctcctccagaaattaacactgtccaggtaacatccactgccgta

SEQ ID NO: 695 - DNA, 570 bp, synthetic construct
  source 1..570: mol_type = other DNA
atgatgaaaagttttttccttgtagtaaccatcctcgctctcaccctccctttccttggcgctcaagagcagaaccaagaacagcctattcgttgcgagaaagacgagagatttttttcagataaaattgcaaaatacatacccatccaatatgttctctcacgttatcccagctatgggcttaattactaccaacagaaacctgtagctctcataaacaaccaattcctgccttatccttactacgcaaaacccgcagctgtcaggtcccccgctcaaattcttcaatggcaggttctgagcaatactgtgcccgccaagtcttgtcaggcacagcccaccactatggccagacatccccaccctcacttgtcatttatggcaatccctcccaagaaaaatcaagataaaactgagatacctactatcaatactattgcatccggggagccaacatccacaccaaccacagaggctgtcgaatctacagttgccactctcgaagactctcccgaggtcattgagtccccaccagaaattaacaccgtgcaggtcacaagcacagctgtc

SEQ ID NO: 696 - DNA, 570 bp, synthetic construct
  source 1..570: mol_type = other DNA
atgatgaaatcttttttcctcgtggttacaattctggcacttacattgcctttcctgggggctcaggaacaaaaccaagagcaacccataaggtgcgagaaagatgaacgctttttcagtgataagatcgcaaagtacataccaattcagtatgtcctgagtcgctatccatcctacggattgaattactatcaacagaagcccgttgctttgataaataatcagtttcttccctacccttattatgcaaagcccgcagcagttcgcagtccagcacagatcttgcagtggcaagtgctctccaatacagtacctgcaaaaagctgtcaggctcagccaacaaccatggccaggcatccccatccccacttgagtttcatggcaatcccccccaaaaaaaatcaagataaaacagaaatccctaccataaatacaatagcttccggggaacctaccagcacaccaacaactgaggctgttgagtctactgtggccacacttgaagactccccagaagtgatagagtcccccccagaaataaacactgtccaagtcactagcaccgccgta

SEQ ID NO: 697 - DNA, 570 bp, synthetic construct
  source 1..570: mol_type = other DNA
atgatgaagtcttttttcttggtggtcactatcctggccttgaccttgcctttcttgggagcccaagaacaaaaccaagaacagccaatccgttgcgaaaaggatgagagattcttcagtgacaagatagcaaagtatattcccatacaatacgtgctgagtcgctatccctcatacggattgaactactatcagcagaaaccagtggccttgattaataaccaattcttgccttatccttactacgcaaagcccgctgccgtcagaagtcccgcacaaatattgcagtggcaagtccttagcaatactgttcctgcaaagagctgtcaagcccagcctacaactatggctcgtcatccccaccctcacctcagcttcatggctatcccccctaaaaagaaccaagataagacagaaattcccaccattaacaccattgcaagcggcgaaccaacctctacccctaccaccgaggctgtggagtcaacagtcgctactttggaagatagtccagaggtcattgagtctccccccgagataaataccgtgcaagtgacaagtacagccgtg

SEQ ID NO: 698 - DNA, 570 bp, synthetic construct
  source 1..570: mol_type = other DNA
atgatgaaatcattttttcttgtcgttactatcttggctcttactctgcccttcctcggtgctcaggagcaaaatcaggagcaaccaattcgttgtgagaaggatgagcgttttttcagcgacaagatagccaaatatatccctattcaatacgtactcagcagatacccctcttatggtcttaactattaccaacaaaagcccgtagcacttataaacaaccagttcttgccctacccttattacgctaagcctgccgcagttagaagtcccgcacagatcctccagtggcaggtgttgagtaacacagtacctgctaagtcttgtcaggcacagccaaccactatggcaagacacccacaccctcacttgtccttcatggcaattcccccaaagaagaatcaggacaagactgagattccaacaattaacactatagcttctggagagccaacttcaacccccactactgaagctgtcgagagcactgttgctaccctcgaagattccccagaagtgatcgaatctcctcctgaaatcaatacagttcaagtgacttcaacagcagtg

SEQ ID NO: 699 - DNA, 570 bp, synthetic construct
  source 1..570: mol_type = other DNA
atgatgaagtcattctttcttgtcgttaccattctggcactcacattgccttttctcggtgcccaggaacagaaccaagagcagcccatccgctgtgaaaaggatgagcgttttttctccgataaaatcgccaaatacattcccatacaatatgtgctgagtcgttacccatcttacggcttgaattactaccagcagaaaccagtggcactgattaacaaccaatttttgccatatccctactacgctaaaccagcagctgtcaggtccccagcacaaatacttcagtggcaggttctttctaataccgtgccagctaaatcttgccaagcacaacctaccacaatggctagacatcctcacccccatctctcttttatggcaatacctcctaagaagaatcaggacaaaaccgaaattcccactataaacactattgcatccggtgaacccacctccacccctactactgaggctgttgaatctactgtggctaccctggaagatagccccgaagtaattgaaagtccccctgagataaacactgtgcaagtgactagcacagccgtg

SEQ ID NO: 700 - DNA, 570 bp, synthetic construct
  source 1..570: mol_type = other DNA
atgatgaaatcattttttctggtggtaaccatactggctttgactctgccatttctgggtgctcaagaacagaatcaggagcaacctatcagatgtgagaaagatgaaaggtttttcagtgataagattgccaagtatatacctatccaatacgtcttgtcccgctatccttcttacggtctgaactattatcagcagaagccagttgccctcattaacaatcagttccttccttacccttactatgccaaacccgctgccgttcgttcacctgctcaaatcctgcagtggcaggttctcagcaatactgtgccagcaaagtcatgtcaagctcagccaacaactatggctcgtcatccacaccctcacctgagttttatggcaattccacctaagaaaaaccaagacaagactgaaattcctaccatcaacactattgcaagcggagagccaacttcaacacccaccactgaagcagttgagagtaccgttgccacccttgaggatagtcccgaggttattgaaagcccacctgagatcaacaccgtgcaggtaaccagcacagctgtc

SEQ ID NO: 701 - DNA, 570 bp, synthetic construct
  source 1..570: mol_type = other DNA
atgatgaaatctttttttttggttgtaactatccttgccttgaccctgccttttttgggagcccaagagcaaaaccaggagcaacctatccgctgtgaaaaggacgaaagatttttcagcgacaagatcgccaaatatataccaatccagtacgttctttcacgctatccttcatatggcttgaattactaccaacaaaagccagtcgcactgataaacaaccagttcctgccctacccatactatgccaagccagccgctgtaaggtcccccgcccagattctccaatggcaggtattgtctaataccgtacccgctaaatcctgccaagcacaaccaaccacaatggcacgtcatccacaccctcatcttagttttatggctattccacctaaaaaaaatcaagacaagaccgagatccctaccattaacaccatcgctagtggcgaaccaaccagcacaccaaccaccgaggctgtcgaatcaacagttgctaccttggaagacagccctgaggttatagaatcacccccagaaattaacactgtccaggtcactagcacagccgtg

SEQ ID NO: 702 - DNA, 570 bp, synthetic construct
  source 1..570: mol_type = other DNA
atgatgaagtcttttttcctggtggtcaccatactcgctctgactctccctttcctgggggcccaagagcaaaaccaagagcagccaatccgttgcgaaaaggacgagaggttcttcagcgacaaaattgccaaatatattcccatacagtatgttctgagtcgttacccatcatatgggctgaattactatcaacaaaaacctgtggctcttatcaacaaccaatttcttccctatccatattacgctaagcctgctgccgtgcgttctccagctcagattctgcaatggcaagtgctcagtaatacagtgcccgccaagagctgtcaggcacagcccacaaccatggctcgtcaccctcatcctcaccttagtttcatggccataccccctaaaaaaaaccaggataagacagagatccccaccattaacacaatagcaagcggagagcctacttctactcctacaacagaagccgtagagtccactgtggcaacacttgaggacagtccagaggttatcgaatcccctccagagataaacactgtccaggtcactagcacagccgtt

SEQ ID NO: 703 - DNA, 570 bp, synthetic construct
  source 1..570: mol_type = other DNA
atgatgaagagctttttccttgtggtcaccattcttgctctgactctcccctttctcggggcacaggaacaaaatcaagaacaaccaatccgttgtgagaaggacgaacgctttttttccgataaaatagctaaatacattcctattcagtacgtccttagtcgttaccccagttacgggttgaattactaccaacagaagcccgttgctctcatcaacaatcaattccttccttacccctattatgctaaacccgctgctgttcgtagccctgctcagatccttcaatggcaggtactctccaataccgtacctgctaaaagctgtcaagcccaacccacaacaatggccaggcatcctcacccccatttgagtttcatggcaattcctccaaagaagaatcaagataagactgagataccaactataaacactatagcttctggggagccaacaagcacccccacaaccgaggctgtcgaaagcaccgttgcaacactggaggattcacctgaggtcatcgagagtccccccgaaataaataccgtacaagtcacttccaccgcagtc

SEQ ID NO: 704 - DNA, 570 bp, synthetic construct
  source 1..570: mol_type = other DNA
atgatgaaatccttttttcttgtcgttaccatcctcgcacttactctgccttttctcggagcacaagaacaaaaccaagagcagccaatacgctgcgagaaggatgagagatttttttccgacaagatagccaaatatattccaatccagtatgtcttgtcccgctacccaagttacggactcaattattatcagcaaaaacccgttgcactcataaataaccaatttttgccatatccatattatgcaaagcccgctgctgtgcgttcaccagcacagatactgcagtggcaggtactcagtaatacagttccagcaaaatcctgtcaggctcagccaactaccatggcccgccatccccaccctcatctcagttttatggctattccacctaaaaaaaaccaggataaaacagagatccccaccattaacactatagctagtggggagcccacttcaactcccacaaccgaggctgtggaatccacagtagccacactggaggatagcccagaagttatagaaagccctcccgagataaacactgttcaagtgacctccacagccgtc

SEQ ID NO: 705 - DNA, 570 bp, synthetic construct
  source 1..570: mol_type = other DNA
atgatgaagagcttctttttggttgtgactatccttgccttgacactgccattcctgggggcacaggaacagaatcaggaacaaccaataagatgcgaaaaggatgaaagattcttttccgataagatcgcaaagtatatcccaattcagtatgttctcagtcgctacccttcctacgggctgaattactaccagcagaaaccagtagctctcatcaataatcaatttctgccatatccctactacgccaaaccagccgctgtaaggagtcctgcacaaatcctccaatggcaggtcctgagtaacaccgttcccgcaaagtcatgtcaagcccagccaaccactatggcaagacatcctcatccccatcttagctttatggcaatacctcctaaaaaaaatcaagacaagacagagattcccactatcaatactatagcttcaggtgagcccactagcacaccaacaaccgaggctgtagaaagtacagttgcaaccctcgaagactcacccgaggtgatagaatcaccacctgaaattaatactgttcaagtgacctctacagccgtc

SEQ ID NO: 706 - DNA, 570 bp, synthetic construct
  source 1..570: mol_type = other DNA
atgatgaagagcttctttctggtcgtcactattcttgccttgactctgccttttctcggggctcaggagcaaaatcaggaacaacctatccgttgcgagaaggacgaacgttttttcagcgataagatcgcaaaatatatccctatccaatatgttctgtcccgttatccctcttatgggctcaattattatcagcaaaagccagtggccttgataaacaaccagtttcttccatatccttattatgccaaacctgcagccgtgcgttccccagcacagatccttcagtggcaagtcttgtcaaacaccgtccctgcaaagtcttgccaggctcaacctacaacaatggcacgtcaccctcacccccatctgtcattcatggcaatccctccaaaaaaaaaccaggacaaaacagagataccaacaatcaacactattgcttccggggagcctacttccacacccacaaccgaggctgttgagagtacagtcgctacattggaagactctcccgaagtcattgagtcacctcctgagattaacactgtccaggtaacatctactgccgtg

SEQ ID NO: 707 - DNA, 570 bp, synthetic construct
  source 1..570: mol_type = other DNA
atgatgaaaagtttcttcttggtggtaacaatccttgctcttactttgccatttttgggtgcacaggaacagaatcaagaacagcccatccgttgtgaaaaggatgagcgtttttttagcgataaaatcgcaaagtacatccctatacaatatgttctgagcaggtacccatcatacggcttgaactattatcagcaaaagcccgtcgctctcatcaacaatcaatttttgccatacccatactatgccaaaccagcagcagtgagatccccagcacagatactccaatggcaagtcctgtccaacacagtcccagccaagtcatgccaagcacagccaaccactatggcccgtcacccacacccccaccttagctttatggccataccccccaagaaaaaccaagacaagactgaaatacctaccatcaacaccatcgccagtggggaaccaacctctactcccaccactgaagcagtcgaatccacagttgcaacactggaggactcccccgaggtgattgaaagccctcccgaaatcaatactgttcaagttacttctacagccgtg

SEQ ID NO: 708 - DNA, 570 bp, synthetic construct
  source 1..570: mol_type = other DNA
atgatgaaatccttcttcctggttgtcactatactggccctgactctccccttccttggggcccaagaacaaaatcaagaacagcccattcgttgtgaaaaagatgagaggttctttagtgataaaatagctaagtacataccaatacagtacgtgcttagccgttacccatcctatggactgaattattaccagcagaaacctgtcgccttgattaacaatcagtttctcccttacccctactacgccaagcctgctgctgttaggtcacctgcccaaatactgcaatggcaagtgctgagcaacaccgttccagccaaaagttgtcaagcacaaccaactacaatggcaagacatccacacccacacttgagttttatggcaatcccacctaagaaaaatcaggacaaaacagagattcctacaataaataccatagcttctggtgagccaactagcacccctacaactgaagcagtagaatcaactgtcgctactttggaggatagtccagaagttattgaatctccaccagaaataaatacagttcaggttacctcaactgccgtc

SEQ ID NO: 709 - DNA, 570 bp, synthetic construct
  source 1..570: mol_type = other DNA
atgatgaagagtttcttcctcgtcgttacaatccttgctctcaccctgccctttttgggtgctcaagaacaaaaccaagaacaacctattcgttgtgagaaggacgaaagatttttctccgataagatagctaaatatatacccatacaatatgtgctctcacgttacccctcctacggcttgaattattaccagcaaaagcctgtcgcactcatcaataaccaatttttgccctacccctattatgctaaacctgctgccgtccgttctccagcacagattcttcagtggcaggttttgagcaacactgtgcccgccaagtcctgtcaagcacagcccactacaatggcacgtcacccacacccccatctctcttttatggccataccaccaaaaaaaaatcaggataagaccgaaatccctactatcaataccatcgcctccggcgaacctaccagcacccccactacagaggctgtcgagtcaaccgtggccacccttgaagattcaccagaggtcatcgaatcacctcctgagatcaatacagtgcaggtgaccagtaccgcagtc

SEQ ID NO: 710 - DNA, 570 bp, synthetic construct
  source 1..570: mol_type = other DNA
atgatgaagagcttttttctggttgtcaccatattggccctcacactccccttcttgggggctcaggagcaaaatcaagagcagcccatcagatgtgagaaagacgagcgcttcttctccgacaagatagccaaatacatacccattcaatacgttttgtccaggtatcccagctacggactcaattattatcagcagaagcctgtagcactcataaacaaccagtttctcccttatccatattacgcaaaacccgccgcagtgaggagtcctgcccaaatcctgcagtggcaggtactttcaaacactgtcccagccaagagttgtcaagcacagccaaccacaatggcacgccatccccatccccacctttccttcatggctattcctcctaaaaagaatcaagacaaaaccgagattccaaccattaacactatcgcttcaggggagcctacctccacccccacaaccgaggctgtcgaatctacagttgctacactcgaagacagccctgaggtaattgaatcaccccccgagataaacacagttcaagttacatccactgcagta

SEQ ID NO: 711 - DNA, 570 bp, synthetic construct
  source 1..570: mol_type = other DNA
atgatgaaatcttttttcctcgttgtgaccattcttgcactgacactccctttcctcggggctcaggagcaaaatcaggagcaaccaatacgttgcgagaaggatgaaaggtttttctcagacaagatagctaagtatatcccaatacaatatgtcctcagcaggtatccttcctacggcttgaattactaccaacagaagcctgtagcattgataaacaatcaattcctgccatatccctattacgcaaagccagccgccgtcagaagtcccgcccaaatacttcaatggcaagtactcagcaataccgtgcccgcaaaatcctgccaagcacagcctactacaatggcaagacatcctcacccccatcttagttttatggctattcccccaaagaaaaaccaggacaagacagagattcctacaattaacactattgcctctggcgagcccacatcaacccccactacagaggcagtggaaagtacagtagctactcttgaggattcccctgaagtcatagaatcacccccagagatcaacactgtccaagtaacttcaaccgcagtc

SEQ ID NO: 712 - DNA, 570 bp, synthetic construct
  source 1..570: mol_type = other DNA
atgatgaaatcattcttcctcgtcgttacaatcctcgcactcaccctccctttcctcggcgcacaagagcaaaatcaagaacaacccatccgctgcgagaaggacgagcgctttttctcagataagatcgccaagtatattcccattcaatatgttttgagccgctacccatcctacgggcttaattactaccagcagaaacctgtcgctctgataaacaatcagtttctcccttacccctactacgctaagcctgccgcagttcgttcacctgcacaaatacttcagtggcaggttctctccaatactgttccagcaaagtcttgtcaagctcaaccaactactatggcccgtcatcctcacccacacttgagcttcatggctattccacctaaaaaaaatcaagacaagactgagataccaacaataaatactatagcctctggggaacccacctcaacccctaccacagaggctgtagagtctaccgtcgctacattggaagactcaccagaggtcatagagtctcccccagaaataaacaccgttcaggtcacttcaactgctgtg

SEQ ID NO: 713 - DNA, 570 bp, synthetic construct
  source 1..570: mol_type = other DNA
atgatgaagagtttcttccttgttgtgacaattctggctctcacattgccatttcttggagcccaggaacaaaaccaagagcagccaattcgttgcgagaaagatgaaaggttctttagcgataaaatagcaaagtacatccctatccaatacgtactcagtcgttaccctagctacggtctcaactactatcagcaaaaaccagttgccctgataaataatcagttcctgccctatccttactacgctaagcctgccgctgtgagatcccctgcacagatacttcagtggcaggtgcttagcaacaccgtccctgccaaatcatgccaggcccaacccaccacaatggcaagacaccctcacccacatctcagttttatggctattcccccaaagaagaaccaagataaaacagaaatccctactatcaacacaatagcatctggtgaacctactagcactcctactacagaagccgtagaatccactgtagctacccttgaggactcccccgaggttatcgaaagccctcccgaaataaacaccgtacaagtaacatctactgccgta

SEQ ID NO: 714 - DNA, 570 bp, synthetic construct
  source 1..570: mol_type = other DNA
atgatgaagtcatttttccttgttgtcactatcctcgcactcactctgccctttcttggggctcaagagcaaaatcaggaacagccaatcaggtgcgagaaagatgaaagattctttagtgacaaaatcgcaaagtacattcctatccagtacgtccttagtcgttacccttcttatggcttgaattactatcagcagaaacccgtggctctgattaacaatcaatttctgccttacccatattacgctaaaccagccgccgttagatcccctgcccagatacttcaatggcaagtactgagcaacaccgtgcccgccaaaagttgccaggcacagccaaccactatggctcgccacccccacccccacctctcttttatggctattccacccaaaaagaaccaagacaaaaccgagatacctaccatcaacaccattgcaagcggtgagccaacatcaacccccaccaccgaagctgtagaatccacagttgccaccttggaggattccccagaagtaatagagagcccacctgagataaacacagtacaggttacttccacagctgtg

SEQ ID NO: 715 - DNA, 570 bp, synthetic construct
  source 1..570: mol_type = other DNA
atgatgaaatccttcttccttgtggttaccatacttgcactgacactgccctttttgggagctcaagaacagaaccaggagcagccaataaggtgtgaaaaagatgagaggtttttttccgacaaaatcgcaaagtacatacccattcaatacgtactcagccgctatccatcatacgggctgaattactatcagcagaaaccagtagctctcataaataaccagtttctcccatatccatattacgcaaagcctgcagccgttagaagtcctgctcagattctccaatggcaagttctcagtaatactgtgcccgctaaaagctgtcaggcccagcccactacaatggcccgtcatccccacccacatcttagcttcatggctattcctcctaagaagaaccaggataaaactgaaattcctaccataaataccattgcttcaggcgagcctacaagcactcccactaccgaggcagtggagtccaccgttgcaacactcgaagattcccccgaggttattgagagtccccctgaaataaataccgtgcaagttacatcaacagccgtc

SEQ ID NO: 716 - DNA, 570 bp, synthetic construct
  source 1..570: mol_type = other DNA
atgatgaaatctttctttctcgtggtgacaattttggctctcactctgcctttccttggcgctcaggagcagaatcaggagcaaccaattaggtgtgaaaaggacgaacgtttttttagcgataagattgccaagtacattcctattcaatatgtgcttagcaggtatccttcctatgggttgaattactatcaacagaagcccgtcgcccttattaacaatcaattcctcccctatccatactacgctaaacccgccgctgttcgcagtcctgctcagattctccagtggcaggtattgtcaaatacagttcctgctaaaagctgccaagcacaaccaacaactatggctcgccatcctcaccctcacctttcctttatggccataccaccaaaaaaaaaccaagataagactgagatcccaactataaacactatagcctcaggggaaccaacatcaaccccaactacagaagccgttgaaagtactgtagccaccttggaggatagccctgaagttatagagagcccacctgagatcaataccgtacaggtaacttccactgctgtt

SEQ ID NO: 717 - DNA, 570 bp, synthetic construct
  source 1..570: mol_type = other DNA
atgatgaaaagtttcttcttggtcgttaccatattggccctcacacttccattcttgggcgctcaggaacaaaaccaggaacaacccattcgctgcgagaaagacgagcgttttttctcagacaagatcgcaaaatatattcccattcagtatgttcttagccgctatccaagctacggacttaattattaccagcagaaacctgtagccctcatcaataatcaattcctgccctatccatactacgctaagcctgccgccgtccgctcacctgcccaaatccttcagtggcaggtccttagtaacaccgttcctgcaaagagctgccaggcacaacccacaacaatggcccgccacccccaccctcatttgagtttcatggcaattccaccaaagaagaaccaggacaaaactgaaatcccaactatcaacaccatagctagtggggaacccacatctaccccaacaactgaagcagttgaaagtaccgtcgctactcttgaggacagtcccgaggtaattgaaagtccaccagagataaacaccgtccaggtgacttcaacagcagtt

SEQ ID NO: 718 - DNA, 570 bp, synthetic construct
  source 1..570: mol_type = other DNA
atgatgaaatcatttttcctcgtggttaccatattggcactcactctcccttttctgggagcacaagaacaaaaccaggagcaaccaattagatgtgaaaaagacgaaaggtttttcagtgacaaaattgctaaatatatccccatacagtatgtgctgtcaagatacccctcctatggactgaattactatcagcagaaacctgtagccttgataaataatcaattcctcccttacccctattacgcaaaacccgccgctgttaggagccccgcccaaatactgcaatggcaagtgctgtcaaatactgttccagcaaaaagttgccaggctcagcccacaaccatggcccgccatccccacccccacctgagctttatggccatccctcctaaaaaaaaccaggataaaactgagatccctacaattaacaccattgctagtggagagccaacatctacacctacaaccgaagctgtagagtctactgtcgctacactggaagacagtccagaagttatcgagtcaccacccgagataaataccgtccaggtcacctcaactgccgtt

SEQ ID NO: 719 - DNA, 570 bp, synthetic construct
  source 1..570: mol_type = other DNA
atgatgaaatcttttttccttgttgtcactatactggctttgaccctgccctttttgggcgctcaggaacaaaatcaggagcaacccattcgctgtgaaaaagacgaacgcttctttagtgacaagatagctaagtatatccccatacaatatgtccttagccgttatcccagttacggcctgaactattatcaacagaagccagtagcacttatcaacaaccagttcctgccctacccctattatgccaaacccgctgctgtgagatccccagctcagatcctgcaatggcaggtactcagtaataccgtgcctgccaaatcatgccaggctcagccaaccacaatggcccgtcatccccatcctcatttgagcttcatggcaataccccccaagaaaaatcaagataagacagagattccaaccatcaatactatagcatccggggaacctacttcaacccctaccaccgaggcagttgagtcaacagtagctactctggaagactccccagaggttattgaatccccacccgaaattaatactgtgcaggtaacaagcactgctgtc

SEQ ID NO: 720 - DNA, 570 bp, synthetic construct
  source 1..570: mol_type = other DNA
atgatgaagagcttttttcttgtggtcacaatcttggctctcactctcccctttctcggagctcaagaacagaatcaggagcaaccaataagatgtgaaaaggatgaaaggtttttctcagataagattgccaaatatatccccattcagtatgttcttagtcgttacccatcctacggtctcaactactaccaacaaaagcccgtggccttgatcaataaccagttcctgccttatccctattacgctaaaccagccgccgttcgctcccccgcccagatactccaatggcaagtgcttagtaacactgttccagcaaagtcctgccaggcccaacctaccaccatggcaaggcatccacatcctcatctgagcttcatggcaataccacccaaaaaaaatcaagacaaaaccgaaattcccacaatcaacacaatcgcaagtggcgagcccacctctacccccacaacagaagctgtagaaagtaccgtggctactttggaagactctcctgaggtgatagagtctccccctgaaatcaacacagtccaggtaacctccactgctgtc

SEQ ID NO: 721 - DNA, 570 bp, synthetic construct
  source 1..570: mol_type = other DNA
atgatgaaatctttctttcttgtagtcacaatcctcgcactcactctcccattcctcggtgcccaggagcagaatcaggagcaaccaattcgttgtgagaaagacgaaagatttttttctgataagatagccaaatacatcccaattcaatacgtcctctcacgttacccatcttacggattgaactattatcagcaaaaacccgtcgccctcattaataatcaattccttccctacccatattatgctaagccagccgcagtgcgctctcccgcccagattctgcagtggcaagttctcagcaacactgtgccagccaagtcatgtcaggcccagcctacaactatggcaagacatccccatccacatctctctttcatggctatcccacccaaaaaaaatcaagacaagacagagatcccaactataaacactattgcatctggagagcccacctcaacaccaacaacagaagcagtcgaatctaccgtagctactctggaagattcccccgaagttatagaaagcccacctgaaataaatacagtgcaggtcacttccacagcagtt

SEQ ID NO: 722 - DNA, 570 bp, synthetic construct
  source 1..570: mol_type = other DNA
atgatgaaatcattttttcttgtagtcacaatccttgctctcactctccctttccttggggcacaagagcaaaaccaggagcaacccattcgttgcgagaaggatgaaaggtttttcagtgacaagatcgctaagtatattccaattcaatatgtcttgagtcgctacccaagttacggccttaactattatcagcagaagcccgttgctttgataaataaccaatttctgccctacccatattatgcaaagcctgctgcagttcgtagcccagcacagattctccagtggcaagtgctcagcaacacagtacctgcaaaaagttgccaagcacagcccactacaatggcacgccatccccatcctcatttgagtttcatggctattcctccaaaaaagaatcaggacaaaacagaaataccaacaatcaatactatcgcaagtggcgagccaactagcacacctacaacagaagctgtggaatccaccgtcgctaccttggaggatagtcctgaggtcatcgaaagcccccccgaaattaatactgtgcaagtcactagcactgccgtt

SEQ ID NO: 723 - DNA, 570 bp, synthetic construct
  source 1..570: mol_type = other DNA
atgatgaagagtttcttcctggtggtcaccatattggctcttactctcccatttttgggggctcaagaacagaaccaagagcagcccatacgctgcgaaaaggatgaaaggttcttttcagacaagattgctaagtacataccaatccaatatgtgctcagcagatacccatcctacggccttaattactaccagcaaaagccagttgccttgataaataatcagtttttgccttacccctattacgctaagcccgcagccgtgaggtcacccgcccagattcttcagtggcaagttctgagcaatacagtccctgctaagagttgccaggctcaacccaccacaatggccaggcatccacacccccatctctcttttatggccatacctcccaagaagaaccaagacaagacagaaatccctactatcaatactatcgcttctggggaacctacctcaacacctaccaccgaggcagtcgaatcaaccgtcgctactcttgaggactcccccgaagttatcgaatccccacccgagatcaataccgttcaggttaccagcaccgccgtt

SEQ ID NO: 724 - DNA, 570 bp, synthetic construct
  source 1..570: mol_type = other DNA
atgatgaagtcatttttccttgttgttaccatcttggcacttactttgccctttctgggggcacaagagcagaatcaggagcaacctatccgctgcgagaaagacgagagattcttctcagacaaaatcgccaagtacatccccattcaatacgtcctcagtcgctacccttcatacggcctgaattattaccagcaaaagccagtggcacttattaataaccaatttctcccctatccatattacgctaaacccgctgcagttagatcaccagcccagattttgcagtggcaggtactgtccaacacagtccctgcaaagagctgccaagcccaacccacaacaatggctcgtcacccccatcctcatcttagctttatggctatcccacccaaaaagaaccaggataagacagaaattcccacaatcaacacaatcgcttcaggcgagcccactagcactcccactacagaggccgttgaatctacagttgcaactcttgaagattcccctgaggtgatagagtccccacctgagatcaatactgtccaagtcaccagcaccgcagtc

SEQ ID NO: 725 - DNA, 570 bp, synthetic construct
  source 1..570: mol_type = other DNA
atgatgaagagcttctttctggtggtgactatactggccttgaccctgcccttcctcggtgctcaggaacaaaaccaagagcaaccaatacgttgtgaaaaagacgaaaggtttttctccgacaaaattgcaaaatatatccctatccaatatgttctcagtaggtatcccagctacggtttgaactactaccaacagaaacccgtcgcattgatcaacaatcagtttctcccatacccctactacgcaaagcctgcagcagttcgtagtccagcacaaatccttcagtggcaggttctgtcaaatacagttcccgccaagtcctgtcaagcacaacctactactatggcaaggcatcctcatccccatctgagcttcatggcaataccacctaaaaagaaccaagacaagactgagatccctactataaacactattgcttctggagaaccaacatcaactcccacaactgaggcagtagagagcacagtcgccacacttgaagacagtcccgaagtaatagaaagcccccccgagatcaacaccgtccaggttacaagtactgccgtc

SEQ ID NO: 726 - DNA, 570 bp, synthetic construct
  source 1..570: mol_type = other DNA
atgatgaagagcttcttcttggttgttactatattggcacttactctgcccttcctcggagcacaagagcaaaatcaagagcagcctattaggtgcgaaaaggacgagcgcttcttttcagacaagatcgccaagtacattcctattcaatatgtcctttcccgctatcctagttacggtctcaactattatcagcaaaagcctgtggcacttattaataatcaatttctgccttatccatattacgcaaaaccagccgcagtacgttcccccgctcagatactccaatggcaagttctgtccaataccgtccctgctaagagttgtcaggcacaaccaactacaatggctaggcatccccacccacacctgtccttcatggctataccacccaaaaaaaaccaggataagaccgaaatcccaaccataaacactatagccagtggcgagcccaccagcactcctactacagaggctgtggagtctaccgtcgcaacccttgaggattccccagaagtaatagaatctccaccagagataaatacagtccaggtcacttccaccgcagtc

SEQ ID NO: 727 - DNA, 570 bp, synthetic construct
  source 1..570: mol_type = other DNA
atgatgaagtctttttttctcgtagttactatcttggccttgaccttgcctttcttgggggctcaggaacagaatcaagaacaaccaatccgctgtgaaaaggacgagcgctttttcagtgataaaattgcaaagtatatccctatccaatacgtgttgagtcgctacccttcatatggactgaattattaccaacaaaagcccgtagccttgataaataaccaatttctcccctacccttactatgccaagcctgccgccgtcagaagtcccgcacaaatcctgcaatggcaggttcttagcaacactgtccccgccaagagctgtcaagctcaacccactactatggcaagacatccacatccacacttgagcttcatggcaataccacctaaaaaaaaccaagataagactgaaatcccaactattaacacaatcgcctcaggtgaaccaacttcaacacccacaaccgaggcagttgaatccactgtagctacattggaagattctcccgaagtcattgaatctcctcccgagatcaatactgtgcaggtcacctccacagccgtc

SEQ ID NO: 728 - DNA, 570 bp, synthetic construct
  source 1..570: mol_type = other DNA
atgatgaaaagtttttttctcgtggtcacaattttggcattgacactgccctttctgggagcccaggagcaaaaccaagaacaacctattagatgtgaaaaagacgagagattttttagcgataagatagccaaatatatacccatccagtatgtactgtcacgctacccttcttacggacttaactattaccaacagaaacccgtggccctgataaacaatcaatttctgccatacccatattatgcaaaacccgcagcagttcgttctcccgcccaaatcctccaatggcaagtcctgtcaaacactgtacccgcaaagagttgtcaggcccagcctactaccatggctaggcaccctcatccccatttgtctttcatggctatcccccccaagaagaaccaagataagacagagattcctaccataaatactattgcatctggcgagcctacctccacaccaacaaccgaggccgtagaaagcactgttgccacattggaagattcaccagaggtcatcgagtccccccctgaaataaatactgtccaggtaactagcacagcagtc

SEQ ID NO: 729 - DNA, 570 bp, synthetic construct
  source 1..570: mol_type = other DNA
atgatgaagtccttttttctggtcgtgacaatccttgccctgactctgccttttctgggagcccaggagcagaatcaagaacaacccattcgctgtgagaaagacgagcgttttttcagtgataagatagcaaagtacatcccaatccaatatgtacttagtcgttatccatcctatgggcttaattactatcagcaaaaacccgtggcacttatcaataatcagttcctcccttatccatactacgctaaacccgccgctgtaaggtcccccgctcaaatactccagtggcaggtattgtcaaacactgtacctgccaaatcttgccaggcacaaccaacaactatggcacgccatccccatccacatctgtcctttatggctatcccccccaaaaagaaccaagacaagactgagattcctaccataaataccatcgcaagtggcgagccaaccagcactcctaccacagaagcagtagaatccacagttgctaccctggaggattcccctgaagtgatagagtctccccctgagataaataccgtccaggtgactagtacagcagtc

SEQ ID NO: 730 - DNA, 570 bp, synthetic construct
  source 1..570: mol_type = other DNA
atgatgaagagctttttccttgtggtcaccatcttggcactcactcttccttttcttggtgcacaagaacagaatcaggaacaacctataaggtgtgaaaaggacgagaggttcttcagtgacaaaatcgcaaagtatattccaatacaatatgtcctcagccgctacccttcctacggccttaactattaccaacaaaaacctgtagcactcattaataatcagtttctcccatacccttattacgcaaaaccagccgccgtgaggtcaccagcccaaattctccagtggcaggtactgtctaacaccgtccccgccaagtcatgtcaagctcaacccactacaatggcaaggcatccccatccacacttgagtttcatggctatacccccaaaaaaaaaccaagataagaccgaaatcccaacaattaacactattgcttctggggaacctacatccactccaacaactgaagccgttgaatcaacagttgccactctggaggatagcccagaggtgatcgaatctcctcccgaaatcaatacagttcaggtcacttccacagcagtc

SEQ ID NO: 731 - DNA, 570 bp, synthetic construct
  source 1..570: mol_type = other DNA
atgatgaagtctttctttctcgtcgtcactatactcgctttgactctgccttttttgggggcacaagagcagaaccaggaacaacctataaggtgcgagaaagacgaaagattttttagtgataagatagcaaaatatattccaattcagtacgttctcagccgctatccctcatacgggctgaattattaccagcaaaaaccagtggctctgataaacaaccagtttttgccttatccatactacgctaaacctgctgctgttcgtagtccagcccagatcctgcaatggcaggtcttgtcaaacactgttcccgcaaagagttgtcaggcccagcctactactatggctcgtcacccccatccccacctgagtttcatggctataccacctaaaaagaaccaagacaaaaccgagatccccacaatcaacaccatagccagtggcgagcccacatcaacccctacaactgaagcagtagaatccaccgtagccactcttgaagactctcctgaagttatagaaagccctcccgaaataaatacagtccaagtgacatcaacagccgtg

SEQ ID NO: 732 - DNA, 570 bp, synthetic construct
  source 1..570: mol_type = other DNA
atgatgaagagtttcttccttgtagtcactatactggcactcacattgccattcctcggggcacaagaacaaaaccaagaacagcctattagatgcgaaaaggacgagagatttttctccgataaaatcgccaaatatatccctatccaatatgtactgtcacgctatccttcttacggcttgaattactatcaacaaaagcccgtcgcccttatcaacaatcagttcctgccttacccatactatgctaagcccgctgctgttcgttcccctgcccaaatccttcagtggcaagtattgagcaacaccgtgcctgctaagtcctgtcaagcacaaccaacaaccatggctcgtcatccccaccctcatcttagttttatggctattcctcctaaaaaaaatcaggataagaccgaaatacccacaataaatactattgcaagtggcgagcctaccagcaccccaaccactgaggccgtagaatctacagttgccaccctcgaagacagccccgaggtcatcgaatccccacctgagatcaacactgtccaagtaacaagtaccgccgta

SEQ ID NO: 733 - DNA, 570 bp, synthetic construct
  source 1..570: mol_type = other DNA
atgatgaagagttttttcttggtggtgacaattttggccttgacccttcccttcctcggtgcacaagaacaaaaccaggaacaacctattcgctgtgaaaaagacgaaagattcttttctgataaaattgctaaatatatacctattcagtatgtattgagcagatacccctcttatggacttaactactaccagcagaagcctgtcgctctgataaacaatcagttccttccttacccatattatgctaagcccgccgccgtccgttctccagctcagatactgcaatggcaagtgctctctaacaccgtccctgcaaagagctgccaagcacagcctaccactatggcacgtcatccccacccacacctcagtttcatggccatcccaccaaaaaaaaatcaagataagacagaaattcccactatcaatacaatagcctctggggagcccacctcaacccccacaactgaagctgttgagtcaacagtggccaccctggaagatagtccagaagttatagagagcccccctgaaataaataccgtacaggtcacatccactgctgta

SEQ ID NO: 734 - DNA, 570 bp, synthetic construct
  source 1..570: mol_type = other DNA
atgatgaaatcattttttctggttgtgaccatattggcattgaccctgcccttcctcggggcccaagaacaaaatcaagagcaaccaatccgttgcgagaaggacgagaggtttttctcagacaaaatagcaaagtacattcccatacagtatgtactctcaaggtaccctagctatggtctcaactactatcaacagaagccagtcgcactcatcaacaatcaattcctcccttacccatactacgctaaacctgccgctgtccgttctccagcacaaattctccagtggcaggtgttgtcaaacacagtgcctgcaaaatcttgtcaggcccaacctacaactatggcaagacaccctcacccccacttgtcttttatggcaataccaccaaagaaaaatcaagataagaccgaaatacccactatcaacactattgcttccggagagcctactagcactccaacaaccgaagcagtagaatcaactgtggctaccttggaggatagcccagaggtcattgaaagtccacccgaaataaacactgtccaggtgacatcaacagccgta

SEQ ID NO: 735 - DNA, 570 bp, synthetic construct
  source 1..570: mol_type = other DNA
atgatgaagagttttttccttgtcgtcaccatactggctctgacactcccctttcttggtgctcaagagcaaaaccaggagcagcctattcgttgtgaaaaagatgagcgcttctttagcgacaaaatagctaaatatatccctatacaatatgtattgtcccgctaccccagttacggcctcaattactatcaacaaaaaccagtggcactcattaacaatcagttcctcccatacccctattacgcaaagcctgccgctgtacgcagccctgctcagatattgcaatggcaggtactttcaaacaccgtgccagccaagtcatgccaagcccaacccaccacaatggccaggcatccacatccccacctctcctttatggccatacctccaaagaaaaaccaggataaaactgagattccaaccataaataccatagcttctggtgaaccaacctcaacacccacaaccgaagccgttgagtcaacagtcgccaccttggaagattctcctgaggtcattgagagtcctccagagatcaatactgtccaggtaaccagcactgccgtt

SEQ ID NO: 736 - DNA, 570 bp, synthetic construct
  source 1..570: mol_type = other DNA
atgatgaagtctttctttctggtggtgactattttggccctgaccttgccatttctcggagcccaggagcagaatcaggagcagccaatacgctgcgagaaggacgaacgcttcttctccgacaaaattgccaaatatattccaatacagtacgtactgtcccgttatccttcttacgggttgaattactaccaacaaaaaccagtagcattgataaacaatcaatttctcccctatccttactatgccaaacctgctgctgttcgcagtcccgcccagatccttcagtggcaggtcttgtccaacacagttcctgctaagagttgtcaagcacaacccacaactatggcacgccacccccatccacaccttagtttcatggctataccaccaaagaagaaccaggataaaaccgagatacctacaataaatacaatcgcctctggcgaacctaccagcacccctaccaccgaagctgtggaaagcaccgtcgccactcttgaggacagtcccgaggttatagagagtccccctgagattaacaccgtccaagtgacatctactgccgta

SEQ ID NO: 737 - DNA, 570 bp, synthetic construct
  source 1..570: mol_type = other DNA
atgatgaaatccttcttcctggtggtgactattttggctctcacactcccatttcttggtgcacaggaacagaatcaggaacaacccattcgttgcgaaaaagatgaaaggttttttagcgataagattgcaaaatatataccaatacaatatgtactgtctcgttaccctagctatggcttgaactattatcagcagaagccagtggctcttattaacaatcaatttttgccctatccttattacgcaaaacccgccgccgtacgctcacctgcacaaatcttgcagtggcaggtcctgtctaatactgtacccgccaagtcctgccaagcacaacccaccacaatggctaggcacccccatccacaccttagcttcatggcaataccccctaaaaagaatcaagataaaacagaaatacccactattaacacaatagcatcaggggagccaacatcaacccccacaacagaagccgttgaaagtaccgttgctactcttgaggactcccccgaggtgatcgaaagcccacctgaaataaatacagtgcaagtgacctcaacagcagtg

SEQ ID NO: 738 - DNA, 570 bp, synthetic construct
  source 1..570: mol_type = other DNA
atgatgaagagctttttccttgttgtcaccatcctggctcttactctccctttcctgggagcacaagagcaaaatcaagagcaacctataagatgcgagaaagacgaaagattcttcagtgacaaaatcgcaaaatatatacccattcaatatgttctctccaggtatcctagctacgggcttaattactaccagcagaagcccgtggccctcatcaacaatcaattcctcccctacccctactacgccaaacccgccgctgttagatcccctgctcagatactccagtggcaggtactttctaatacagtgcccgcaaagtcctgtcaggcacaacctaccactatggctaggcatccccatcctcatctgagttttatggctatcccacctaagaagaaccaggacaagacagagattccaaccataaacaccatagcttctggcgaaccaacatcaactcccactacagaggcagtcgagagcaccgtcgcaacacttgaggattcacctgaggtcatagaatcccctcccgagataaatacagtccaggtaaccagtaccgccgtc

SEQ ID NO: 739 - DNA, 570 bp, synthetic construct
  source 1..570: mol_type = other DNA
atgatgaagagtttcttcctcgtagtcacaatccttgcattgaccctcccctttcttggggctcaggaacagaatcaagagcaaccaatcagatgtgagaaggacgagagatttttcagcgataagatcgcaaaatacattcccatccaatacgtcctcagtcgctacccctcctatggtcttaactattatcaacaaaaaccagtcgctttgattaataatcagttcttgccatacccctattatgcaaagccagcagccgttaggtctcccgcccagatcctccagtggcaggttctgtctaacactgtgcccgcaaagtcatgccaggctcaaccaaccactatggctagacaccctcatccacatttgtccttcatggccatcccacccaagaagaatcaggacaaaactgaaattcccacaatcaataccatcgcatctggagagccaacctcaactccaacaactgaggccgtggagtccacagttgctacccttgaagatagtcctgaggtcatcgaaagtcctcccgagataaatactgtccaagtaacctctactgccgtt

SEQ ID NO: 740 - DNA, 570 bp, synthetic construct
  source 1..570: mol_type = other DNA
atgatgaagagtttctttttggtggtaaccatcctcgctctgactcttccctttcttggtgcccaagagcagaatcaagaacagcctatccgttgcgagaaagacgaaagattcttctccgacaagatagctaagtatatccccatacaatatgtattgtctcgctatccttcctatggcttgaattattatcagcagaaacctgttgctcttataaacaaccagtttttgccatatccttattatgctaagcctgccgcagtcagatcccccgcacagattcttcaatggcaggttctctccaatacagtccctgcaaagagttgtcaagcacagccaactactatggctagacatcctcatcctcatctctcattcatggctatcccaccaaaaaagaaccaggataaaacagaaataccaaccattaacaccattgcttccggagaacctacctccaccccaactactgaggcagtggaatctacagtagccacccttgaggactctccagaggttattgagtcccctccagagataaacaccgttcaagtgacctctacagctgtg

SEQ ID NO: 741 - DNA, 570 bp, synthetic construct
  source 1..570: mol_type = other DNA
atgatgaaaagtttctttctcgttgttactatacttgcactgactctgccattccttggcgcccaagaacaaaaccaggagcaacctatcagatgtgagaaggatgaaaggtttttctccgacaagatagcaaagtatatccctatccaatatgttttgtcccgttaccctagctatgggcttaattactaccaacagaagccagtcgccctcatcaataatcagttccttccctacccatattacgccaagcctgccgccgtgaggtcacctgcacaaatcttgcaatggcaagtgctgtctaacaccgtaccagccaaaagctgccaggcccaacctacaacaatggcccgtcatcctcacccccatctttcctttatggccattccaccaaaaaaaaaccaagataagaccgagatccctaccataaatacaatagctagtggggaacccaccagcactcccacaaccgaggcagtggaatctaccgtagcaactctggaggattctcctgaggttatagaatctccccccgagatcaatacagtccaggtaaccagcacagccgtt

SEQ ID NO: 742 - DNA, 570 bp, synthetic construct
  source 1..570: mol_type = other DNA
atgatgaagagtttcttcctggtggtgaccattcttgccctgacactcccatttcttggggcacaagagcagaatcaggaacaacccatacgctgtgagaaggatgaaagattttttagtgataaaatcgccaaatacataccaatacagtatgttttgtcaagatacccctcctacggacttaactactaccaacaaaaaccagtcgctctcattaacaatcagtttctcccctatccatactacgctaaacctgccgccgtgagaagcccagcccagattctccagtggcaggtcctcagcaataccgtcccagctaagagctgccaagctcaacctactacaatggcacgccaccctcatccacacctgagtttcatggcaataccccctaaaaagaaccaagacaagacagaaataccaaccatcaacaccattgcatccggggagcctacttcaacacctacaacagaagccgtcgagagcactgttgctactctggaagacagtcctgaagtgatcgagtcccccccagagatcaatactgtccaagtcacctccaccgcagta

SEQ ID NO: 743 - DNA, 570 bp, synthetic construct
  source 1..570: mol_type = other DNA
atgatgaaatccttcttcctggtggtaaccattttggccctcaccctgccattcttgggagcccaggaacagaatcaggaacagcctatccgctgtgaaaaagatgagagattctttagcgataagattgcaaaatatattcccattcagtacgtcctctccaggtatccctcttatggacttaattattatcaacagaagcctgtggctctgataaacaatcagtttctgccatacccctactacgcaaagcccgctgccgtcaggagccccgctcaaatactgcaatggcaggtccttagcaacacagttcccgccaagtcttgccaagcacaacctacaacaatggccagacacccccatccccatctctcattcatggcaatcccccctaagaagaaccaggacaagactgaaatacctaccataaatacaatagccagtggtgaacctaccagcacccctactaccgaggccgtagaaagtacagtagccactcttgaagacagtccagaggtaatcgagtcaccccccgaaatcaacaccgttcaagtcacatcaactgccgta

SEQ ID NO: 744 - DNA, 570 bp, synthetic construct
  source 1..570: mol_type = other DNA
atgatgaaatcattttttcttgtcgtgactattttggcacttacattgccattcctgggagcacaagagcagaatcaggagcaacccattaggtgcgaaaaagatgagcgttttttctctgataagattgccaaatacatccctatacaatatgtcctgagtagatacccatcttatggactcaactactatcagcaaaagcctgttgcactcattaataaccagtttcttccttatccatactatgctaaacctgccgccgtgaggtctccagcacaaatcctccaatggcaggtcctttccaatactgtcccagccaaatcatgtcaggcccaacccacaacaatggcaagacatcctcatccccacctgtctttcatggcaatacctcctaagaagaatcaagataagaccgaaattcctacaattaacacaatagccagcggagagcccactagtacacccaccaccgaagcagtcgaatctacagtagcaacacttgaggattcacccgaggtaattgaaagcccacccgagattaataccgtgcaagtgaccagtaccgctgtg

SEQ ID NO: 745 - DNA, 570 bp, synthetic construct
  source 1..570: mol_type = other DNA
atgatgaagtccttctttctcgtagtcaccattctcgctctgactcttcccttccttggtgcccaggaacagaaccaggagcagcccatccgttgcgagaaagatgagcgtttcttctcagataaaattgccaaatatatacctattcagtacgttttgtccaggtacccttcatacggattgaactattaccaacaaaaacctgtagcactcattaacaaccaatttctcccttatccatactacgcaaagcccgcagcagtgcgttcaccagcacagatactgcaatggcaagtcttgagtaacacagtacccgcaaagtcctgtcaagctcagcctacaacaatggcacgccatccccatcctcacctcagctttatggctattcctccaaagaaaaaccaggataagacagaaatccctaccattaacactatcgcatcaggagagccaacctcaacccctacaaccgaggccgtagaatctacagttgcaacccttgaagactcacccgaggtcatagagtctcctcctgagattaacaccgttcaagtgacctcaaccgccgtg

SEQ ID NO: 746 - DNA, 570 bp, synthetic construct
  source 1..570: mol_type = other DNA
atgatgaaatctttctttcttgtagtcacaatactggcccttaccctgcccttcctcggggctcaagagcaaaatcaggagcagcctatcagatgtgagaaggatgaacgttttttttcagacaagatcgctaaatacatacccattcaatacgtgcttagcagatacccatcttacgggctcaattactatcaacaaaagccagtcgcacttataaataatcaattcctgccatacccatattacgccaagccagccgctgtaagatccccagcacaaatcctccagtggcaagtccttagtaatactgtgcccgctaagagttgccaggctcaacctactaccatggctaggcacccccatccacatctttctttcatggccatacctcccaaaaaaaaccaggataaaactgaaatcccaacaataaacacaatcgcttctggcgagccaacatccacccccactaccgaggcagttgagtccactgtcgccactcttgaggacagtccagaggtaattgaatctccacccgagatcaacacagttcaagtcacttccactgctgtg

SEQ ID NO: 747 - DNA, 570 bp, synthetic construct
  source 1..570: mol_type = other DNA
atgatgaaatcattttttctggtggttaccatactggcactgaccctgccctttttgggcgcacaggaacagaatcaagaacaaccaattagatgtgagaaggacgagcgttttttcagcgataagatcgctaaatatattcccattcaatacgtcctgagccgctatccctcatacggattgaactactaccagcagaagcctgtagctcttatcaataaccaatttttgccttacccttactatgccaagccagcagctgtcaggtcccccgcacagatactccagtggcaggtccttagtaataccgttcctgcaaagtcttgccaggctcagcccacaactatggcacgtcatcctcacccccacttgtcattcatggcaataccacccaagaaaaatcaagacaaaaccgaaatacctactataaacacaatagcatctggtgagcctacctcaacaccaaccactgaagccgttgaaagcactgtggctaccttggaagattcacctgaggtgatcgagtccccccctgaaatcaataccgttcaagttacctctactgccgtc

SEQ ID NO: 748 - DNA, 570 bp, synthetic construct
  source 1..570: mol_type = other DNA
atgatgaaatctttttttttggtggtgacaatactcgctctcactctcccatttttgggggctcaggaacaaaatcaggaacaaccaatcaggtgtgagaaagacgaaaggttcttctctgacaagattgcaaagtacatacctatacaatacgttcttagccgttatccaagttacggcctgaactactaccaacagaaacctgtagctttgataaacaatcaatttttgccctatccttattacgccaagcccgcagccgtaagaagtcccgcccagattttgcagtggcaagtgttgtctaatacagtgcctgccaaaagctgccaggcccagccaaccacaatggctcgtcatccccacccccatctgtccttcatggctatacctcccaagaagaaccaagacaagacagaaatacccaccattaacactattgcttcaggggaacccacatcaacaccaactactgaggctgtggaatcaaccgtcgccacccttgaggacagtccagaggtgattgagagccccccagagattaatacagtccaggtcactagtaccgcagta

SEQ ID NO: 749 - DNA, 570 bp, synthetic construct
  source 1..570: mol_type = other DNA
atgatgaagagtttcttcctggttgttacaattctggcacttactctgccctttttgggagcacaggagcagaatcaggaacagccaatacgttgtgagaaggacgagcgttttttctctgataagattgcaaagtacatacctattcagtacgttctcagtcgctatccttcctatgggttgaattattatcagcagaagcctgtggcacttatcaacaatcagtttctgccttacccatattatgctaaacctgcagccgtgcgttccccagctcagatactccaatggcaggtccttagcaacaccgtaccagcaaaatcatgccaagcacaacccaccacaatggcccgtcatccacatccccacctgtcttttatggccatcccccccaaaaagaatcaggacaagacagaaatacccacaatcaatactattgcatctggtgaacctacctccactcctactactgaggccgtcgagagcaccgtagcaacactggaagatagccccgaggtgatcgagagtcctccagagataaacactgtgcaagtaacctcaacagcagtc

SEQ ID NO: 750 - DNA, 570 bp, synthetic construct
  source 1..570: mol_type = other DNA
atgatgaaaagtttttttcttgtcgtgaccatcctggccttgacccttccatttctgggtgcccaggagcagaaccaagagcaaccaatcaggtgtgaaaaggacgagcgctttttttccgacaagattgcaaaatacattccaatccagtacgtccttagcagatacccatcttacggactcaactattaccaacaaaaaccagtcgcccttattaacaatcagtttctgccttacccctactatgcaaaacctgccgccgttaggagccctgcccagattctccagtggcaagttctctcaaacaccgtaccagcaaagagttgtcaggctcagccaaccactatggctagacacccccatccacatctcagttttatggcaataccccctaagaaaaatcaggataagaccgaaataccaactataaacaccatagcatccggggaacccacaagtacacctaccacagaagctgttgagagtactgtggcaacactcgaagattctcccgaagtcatagaatcaccaccagagataaacactgtccaagttacaagtacagccgta

SEQ ID NO: 751 - DNA, 570 bp, synthetic construct
  source 1..570: mol_type = other DNA
atgatgaaatcattttttcttgttgtaactatcctggccttgacactgcccttcttgggggcccaggagcagaatcaggaacagcctattagatgtgaaaaggacgagagattttttagcgacaaaattgcaaagtacatacccatccagtatgttttgtccaggtatcccagctatggtcttaattactatcaacaaaaaccagtggccctcatcaataaccaatttctcccatacccctactatgcaaagcctgctgctgtcagaagtccagctcaaattctgcaatggcaggtccttagcaatacagtcccagccaaaagctgtcaagcacagccaacaacaatggcccgtcatccccacccccatctctcatttatggctataccccctaaaaaaaatcaggataagaccgagattccaactatcaacactattgccagtggtgaaccaacatccacacctactactgaggcagtagagtccactgtggctaccctggaagactctccagaggtcattgagagtcctcccgagattaatacagtacaagtgacctctactgctgtc

SEQ ID NO: 752 - DNA, 570 bp, synthetic construct
  source 1..570: mol_type = other DNA
atgatgaaatccttcttcctggtagtgactatccttgctcttacactgccttttttgggggcccaggagcaaaaccaagagcagccaatccgctgcgagaaggacgaaaggttctttagcgataaaatagctaaatatattcctatacaatatgtcctttctcgttaccctagttacggtctcaattactaccaacagaaacctgttgctttgatcaacaaccagttccttccctatccctattacgccaagcctgctgcagtccgttctccagcacagatattgcagtggcaagtattgagtaatactgtccccgccaaaagttgtcaggcccaaccaaccactatggcaaggcatccccatcctcaccttagtttcatggctattccccccaaaaagaaccaagacaaaactgaaatcccaaccattaacactattgcttcaggcgagccaaccagtacccctacaaccgaggccgttgaaagtacagtggctacccttgaagactcccctgaagttatagaatcaccccccgagatcaacacagtgcaggtcacctcaactgccgtg

SEQ ID NO: 753 - DNA, 570 bp, synthetic construct
  source 1..570: mol_type = other DNA
atgatgaagagtttttttctggtggtcacaatactcgctctgactttgccctttctcggtgctcaagagcagaatcaagaacaacccattcgctgtgaaaaggatgagcgctttttctccgataaaatcgccaagtatattccaatacaatacgtgctctctaggtacccctcatacggtcttaactactaccagcaaaagcctgtggcactcatcaataatcaatttctcccttacccctattacgcaaagccagcagccgtgcgtagccccgcacagatattgcagtggcaggttctctctaatactgtgcccgctaagtcctgtcaagcccagcccaccactatggctagacaccctcacccccatctctcctttatggcaataccacctaaaaaaaatcaggacaaaaccgagatccctacaattaacaccattgccagcggtgagccaacttctactcccacaacagaggctgtagagtccaccgtcgctactctggaggattcacccgaagtcatcgagtctccacccgagattaatacagttcaggtaaccagtaccgctgtt

SEQ ID NO: 754 - DNA, 570 bp, synthetic construct
  source 1..570: mol_type = other DNA
atgatgaaatcattcttcttggtggtcaccatcctggcattgacactcccttttctgggtgcccaggagcagaaccaagaacaacctatacgctgcgaaaaggacgaaagattcttttccgacaaaattgccaaatatataccaatccaatatgttttgagtcgttaccccagctatggcctcaattattaccaacagaaaccagtggctctcatcaataatcagtttctcccctatccatattatgccaaaccagcagctgtgaggtctccagctcaaatcctgcagtggcaagtcctgagtaatactgtcccagccaagtcttgtcaggctcaacccacaactatggctagacatccacaccctcacctttcctttatggccatccccccaaagaagaatcaggacaagacagaaataccaactattaacaccatcgcaagtggagagccaacaagcactcctacaacagaagctgttgagtctaccgtggctaccctggaggactcacccgaggtaatcgagagtcctcctgaaataaatacagtacaggtgacctccaccgccgtc

SEQ ID NO: 755 - DNA, 570 bp, synthetic construct
  source 1..570: mol_type = other DNA
atgatgaagtcattttttctcgtggtgacaatactcgcacttacccttcccttcctcggagcccaggagcagaatcaggaacagccaatcagatgcgaaaaggatgaacgctttttcagtgacaaaatagcaaagtatataccaatacagtatgttctctctcgctacccaagttatggtcttaactactaccaacaaaagcccgtagcattgatcaacaaccaattccttccatatccttattacgccaaaccagctgctgttaggtcaccagctcaaatcctccagtggcaggttcttagcaacaccgtgccagcaaagagttgccaagcccaaccaaccactatggctcgccatcctcatcctcatctcagctttatggctattccacccaagaagaatcaagataagactgaaatacccacaatcaatacaatcgcatctggagaaccaacttccacccctacaactgaagcagttgagtctaccgtggctaccctggaagacagcccagaggtcatcgaaagtccccctgagatcaacacagtacaggtaacctccacagccgtc

SEQ ID NO: 756 - DNA, 570 bp, synthetic construct
  source 1..570: mol_type = other DNA
atgatgaaatcttttttcctcgtggtgactatacttgctcttacactccctttcttgggggcccaagagcaaaaccaggaacaacctattaggtgtgagaaggatgaacgtttcttctcagataaaatagcaaaatacatcccaatacagtatgtgctgagtagatacccaagttatgggttgaattattatcagcagaagcctgtagccctgatcaataatcaatttttgccttatccctattacgcaaaacccgccgctgtaagaagtcccgcccaaatactgcaatggcaggtcctttcaaatacagtacccgccaaaagttgtcaggctcaaccaacaacaatggcaaggcatcctcatccacatctttctttcatggcaattcctcccaaaaaaaatcaggacaagaccgagattcccacaatcaatacaatcgcaagcggtgagccaacctctacaccaacaacagaagccgtagagtcaacagttgctacactggaagacagccctgaggtcattgaaagcccccccgagataaataccgtgcaggtaaccagtactgccgtt

SEQ ID NO: 757 - DNA, 570 bp, synthetic construct
  source 1..570: mol_type = other DNA
atgatgaaatccttcttcctcgtggttacaatactggcccttaccctgccatttctcggggcccaggagcaaaaccaagagcaacctattcgctgtgaaaaggacgagagatttttcagcgacaagatcgcaaaatacatacccatacaatatgtcttgtccaggtatccatcttacggcctgaattattaccagcagaaacccgttgccctcattaacaaccagtttcttccttatccctattatgcaaaacctgctgccgttcgttccccagctcaaattcttcagtggcaggtactttcaaataccgtacccgccaaatcctgtcaagctcaaccaaccactatggcccgtcacccacacccacatctctcctttatggcaatcccacctaaaaagaatcaggataagacagagattcctacaatcaatacaatagcaagtggggaaccaacaagcacaccaaccactgaggctgtcgaatccaccgttgccacacttgaagattctccagaagtaatcgaatcaccccccgaaatcaacactgtccaagtaacaagtaccgccgtc

SEQ ID NO: 758 - DNA, 570 bp, synthetic construct
  source 1..570: mol_type = other DNA
atgatgaagagtttctttctggtggtgacaattcttgctctcacactcccctttctcggggctcaagaacagaaccaggagcagcctatacgttgcgagaaagacgaaagattcttcagtgataagattgcaaagtatataccaattcaatacgttctgtcacgttatccttcatacgggttgaactattaccaacaaaagccagttgctctcattaacaaccagttccttccctacccatactatgccaaacctgctgccgtgagatcccctgcccaaatcttgcaatggcaggtgctttctaacacagtgcccgcaaagagctgccaggcccaacccactaccatggctaggcatccccatccccatctcagcttcatggctatccctccaaaaaagaaccaagataagacagagatacccaccataaatacaatcgccagtggcgaacctacctcaacaccaactactgaggctgtagaatcaacagtggctactcttgaagacagtcccgaggtgatcgagtcccctcctgaaattaacacagtccaggttacatccaccgccgtg

SEQ ID NO: 759 - DNA, 570 bp, synthetic construct
  source 1..570: mol_type = other DNA
atgatgaagagcttttttttggtcgttacaatactggccctgacactcccctttcttggcgctcaagaacaaaaccaggaacagcctattaggtgcgaaaaagacgaaaggtttttcagtgacaaaattgctaaatacatccccatacaatatgtactctcccgctaccccagctatggccttaattactaccaacaaaaacctgttgcattgatcaataatcagtttctgccttacccctattatgctaaacccgctgctgtccgttctcctgcacagattctccaatggcaagtactctctaatacagttcccgccaaatcttgccaagcacagccaaccactatggctcgccatccccatcctcacctttccttcatggccataccaccaaaaaagaaccaggacaaaactgagataccaaccataaatacaatcgcctctggggagcccacttctacccctactaccgaggccgttgaaagtactgttgctacccttgaggattcccctgaagtaatcgaatcccctccagagataaatacagtacaagtcacttccacagcagtc

SEQ ID NO: 760 - DNA, 570 bp, synthetic construct
  source 1..570: mol_type = other DNA
atgatgaagagtttttttcttgtagttactatcttggccctgacccttcccttcttgggcgcccaagaacaaaaccaagagcaacctattcgttgtgaaaaggatgaaagattctttagtgacaaaatcgcaaaatacatccctatccagtatgttctttcacgctatccatcttatgggttgaactactatcaacaaaaaccagtagcacttattaacaaccagttcctcccctatccctactatgcaaagcccgcagctgttaggagtcccgcccagattttgcagtggcaggttctcagcaacacagttcccgctaagtcatgtcaagcacagcccacaactatggctaggcatccccacccccatcttagttttatggcaatccctcccaagaaaaaccaggataaaacagagatacctaccataaatactatagcttcaggagaacccacctccactcccactacagaagcagtcgagtctactgttgcaacacttgaagacagccctgaggtaattgagtctcctcctgaaatcaatactgttcaagtgacctccacagccgta

SEQ ID NO: 761 - DNA, 570 bp, synthetic construct
  source 1..570: mol_type = other DNA
atgatgaagagtttctttctcgttgtaactattctggcacttaccctcccatttctcggcgcacaagagcagaatcaggaacagcctattcgttgcgaaaaggatgagaggtttttttctgacaaaattgccaaatatatcccaatacagtatgtgctgtcccgttatccttcctatggactgaactattaccagcagaaaccagtagctttgattaacaatcaattcttgccttatccctattacgccaaacccgctgccgtcaggtctccagcccagattttgcagtggcaggtgctttccaatacagtacctgccaagtcctgtcaggctcagccaacaaccatggccaggcaccctcaccctcacctctccttcatggccattcctcctaaaaaaaaccaagataagactgaaattcccactattaatactatcgcttcaggtgaacccactagcactcctacaactgaggcagtcgaatccactgttgcaactttggaggattcccctgaggttatcgaaagtcctccagagataaatacagtgcaggtgactagcacagccgta

SEQ ID NO: 762 - DNA, 570 bp, synthetic construct
  source 1..570: mol_type = other DNA
atgatgaagtccttctttcttgtggtaactattctcgccctgactttgccttttctgggggcacaggaacaaaatcaagaacaaccaatcaggtgtgagaaagatgaaagatttttcagtgataagattgcaaagtacatacctattcaatatgttctctctaggtatccaagttatggccttaactactatcagcagaaacctgtagctcttattaacaaccaatttttgccatatccatattacgctaagccagctgccgtcagaagcccagcacaaattctccagtggcaggtcttgtctaacacagttcctgccaaaagttgccaagcacaaccaacaacaatggcacgccacccacaccctcatctgtccttcatggcaattcccccaaaaaaaaaccaagacaagactgagatccccactattaacacaatcgcctccggggaacctacaagcactccaaccacagaggcagtggagagcacagtagccaccttggaggatagtcccgaagttatcgagagccctcctgaaattaacacagtacaggtcactagtacagctgtc

SEQ ID NO: 763 - DNA, 570 bp, synthetic construct
  source 1..570: mol_type = other DNA
atgatgaagagtttcttcctcgtggttactatactggccctcactctgcccttcctgggtgcacaggagcaaaaccaggagcaacccatacgttgcgaaaaggatgaaagatttttttcagataaaatcgctaaatacatacccatacagtatgtattgagtagatacccctcttatggcctcaattactatcagcaaaaaccagtcgctctcataaataatcagttcttgccctatccatattatgcaaagccagcagctgtcagatccccagcccagatactccaatggcaagtcctctccaatacagtccccgccaaaagttgccaggctcaacccacaacaatggcaaggcaccctcacccccatctttccttcatggcaatacccccaaaaaagaaccaagacaaaaccgaaatacccacaataaacactatcgcttcaggtgaacccaccagcacacccacaaccgaagctgttgagagcaccgttgctacacttgaggactcccccgaggtaatagaatcccctcccgagattaacacagtgcaggtaacatctacagctgtg

SEQ ID NO: 764 - DNA, 570 bp, synthetic construct; identical to SEQ ID NO: 763
  source 1..570: mol_type = other DNA

SEQ ID NO: 765 - DNA, 570 bp, synthetic construct
  source 1..570: mol_type = other DNA
atgatgaagagtttctttcttgtggtgacaatattggcactcaccctgccatttttgggcgctcaagagcagaatcaagagcagcctataaggtgtgaaaaagatgaacgcttcttcagcgacaagattgccaagtatatacctattcagtatgtcctcagtcgctatcccagttatggcttgaattattaccaacaaaagccagtcgcactgataaataatcagttcctgccctatccctattacgcaaagccagcagccgtcagaagcccagctcaaatattgcaatggcaggtactttcaaacaccgtacccgcaaagtcatgccaagctcagccaacaactatggctcgccatccacacccacatctcagtttcatggcaataccaccaaagaagaatcaagacaaaacagaaataccaacaataaatacaatcgccagtggcgagcctacaagtactccaaccactgaggctgttgaaagtactgttgcaactctggaagattcccctgaggtcattgaaagcccacctgaaattaatacagtacaagtgacttccaccgccgtg

SEQ ID NO: 766 - DNA, 570 bp, synthetic construct
  source 1..570: mol_type = other DNA
atgatgaagagtttctttctcgtcgtgacaatccttgctcttactctccccttcttgggtgcacaagaacagaaccaggaacaacctatccgttgtgaaaaggatgagaggttcttcagcgacaaaattgccaagtacatcccaattcagtacgttctttcccgttatccatcatatggccttaattattaccagcaaaaacctgtagctcttatcaacaatcaattcttgccatatccctattacgcaaaaccagcagccgtacgttctccagctcaaatactccagtggcaagttcttagcaatacagtcccagcaaagagctgtcaggcacaacctactactatggcccgccatccccatccccacctgagttttatggctatccccccaaagaagaatcaggacaagaccgaaattccaactataaacacaatcgcctcaggcgaacccacttctactcccactaccgaggccgtggagtctactgtggctacactggaagattcacctgaagtcattgaatcacctcccgaaattaataccgtgcaagttactagcactgctgta

SEQ ID NO: 767 - DNA, 570 bp, synthetic construct
  source 1..570: mol_type = other DNA
atgatgaagagtttttttctggtggttacaatcctcgccttgacattgccatttttgggtgcacaagagcagaatcaagaacaacccataaggtgcgaaaaggacgagagattcttctctgataaaatcgcaaagtatatccccatacagtacgtcctttctcgctacccttcatacggcctgaactactaccaacaaaagcccgtcgcattgataaataatcagttcctgccttacccctattatgctaagcccgccgcagttagatcacccgcccaaattcttcagtggcaggtgcttagcaacacagttcctgccaagagctgtcaagcacagccaaccacaatggcaaggcaccctcaccctcacttgagttttatggctattcctcccaagaaaaaccaggataagactgagataccaacaataaatacaattgcatcaggcgagccaacatctactccaaccactgaagcagtagaatctaccgtagctacactggaggactctccagaagtgatagagtctccaccagagatcaatacagtccaagtcactagcaccgcagtt

SEQ ID NO: 768 - DNA, 570 bp, synthetic construct
  source 1..570: mol_type = other DNA
atgatgaagtcatttttcttggtagtcaccatacttgctttgacactcccttttttgggtgctcaggaacagaatcaagaacaaccaatccgctgtgagaaagacgaaaggtttttctctgacaagatagccaagtatatcccaatccagtatgtgttgagtcgctacccaagttatggcctcaactattatcagcagaaacctgtggctcttataaataatcagtttctgccttatccttactacgccaaaccagcagcagtacgctcacccgcccaaattctccagtggcaggtactctccaatactgtccccgcaaagtcatgccaggcccaacctactaccatggctcgtcacccacatccacatctttcatttatggctatacctcctaagaagaaccaggataagactgagattccaactataaataccatcgcaagcggtgagccaacttctacacctaccaccgaagctgtcgagtctacagtagcaacacttgaagactcaccagaggtaatcgagagcccccctgaaataaacaccgtacaagtcactagcacagcagtc

SEQ ID NO: 769 - DNA, 570 bp, synthetic construct
  source 1..570: mol_type = other DNA
atgatgaaatccttctttctcgtggttacaattcttgccctcacactccctttcctcggggctcaggagcagaaccaggaacagcccattaggtgcgagaaggatgaaaggttttttagtgacaagatcgctaagtatataccaattcagtatgtgctttctcgctatcctagttacggtcttaactattaccaacagaaacccgtcgcacttataaataaccaattcctgccatacccatactacgcaaaacctgccgcagtgaggagtcccgcacagatactccagtggcaggtactcagtaataccgtacccgcaaagtcatgtcaagcacagcctactacaatggcacgtcaccctcatcctcatcttagtttcatggcaattcctcccaagaaaaatcaggacaaaacagaaatccccactatcaatactatagcatcaggtgagcctactagtacaccaacaacagaggctgttgaatccactgtagctactcttgaggatagtcccgaagtgattgaaagcccacctgagatcaacaccgtgcaagttacaagtactgccgtg

SEQ ID NO: 770 - DNA, 570 bp, synthetic construct
  source 1..570: mol_type = other DNA
atgatgaagtctttcttcctggtggtcactatactggcccttacactgcccttcctgggggcacaggagcaaaatcaggagcaacctatcaggtgcgaaaaagatgaaaggttctttagcgataaaatcgctaagtacatcccaatacaatacgtacttagcaggtaccccagctacgggcttaactattatcagcagaaacccgttgcattgattaacaaccagttcttgccatatccttattatgctaagccagcagccgtgaggtcacctgcacagattctgcaatggcaagtgctctcaaacacagtgccagccaagtcttgtcaggcacaacccacaacaatggcacgccacccacaccctcatctttcattcatggcaattccacccaaaaagaaccaggacaaaaccgaaatcccaaccatcaacaccatagcctccggcgagcccacctccacccccactactgaagctgtagagtccactgtcgctacactggaagatagtccagaggtgattgaaagcccccccgaaatcaataccgtacaagtcacctccacagccgta

SEQ ID NO: 771 - DNA, 570 bp, synthetic construct
  source 1..570: mol_type = other DNA
atgatgaagagctttttcctggtagtaactatacttgctcttaccttgccctttctcggtgcccaggagcaaaatcaagagcaacccatcaggtgcgaaaaggacgagcgctttttttcagataagatagccaaatacatacctattcagtatgtgttgtcacgctacccatcatatgggctgaactactatcagcaaaagcctgtggccctcattaacaatcaatttctgccttatccctactatgccaagccagccgcagtaaggagcccagcacaaatcttgcaatggcaagttctctccaacaccgttcctgccaagagctgtcaagcccaacccacaactatggcccgccacccccaccctcacctctccttcatggcaattccccccaaaaagaaccaagataaaaccgagataccaacaataaacactattgccagtggagagccaacctccactcccacaaccgaagcagtggagagcaccgtggcaactcttgaagattcacctgaggtaattgaatcacctcccgaaatcaatacagtgcaagttacttctactgccgta

SEQ ID NO: 772 - DNA, 570 bp, synthetic construct
  source 1..570: mol_type = other DNA
atgatgaaaagtttttttctcgtcgtgacaatcttggcccttactctgccattcctcggcgcccaagaacaaaaccaggaacaacccattcgctgtgagaaggacgagaggttttttagcgacaaaatagcaaagtacatccctattcaatatgtcctcagccgttatccttcatacggcttgaattactatcagcaaaaaccagtggcattgattaacaaccagttcttgccctatccttattacgccaaacctgcagccgtacgctcacccgcccagatcctccaatggcaggtactgtctaataccgtacccgctaagagctgtcaggcccaacctacaacaatggcaagacatcctcacccccacctttcctttatggctattccacccaaaaagaatcaggacaagaccgagatacctaccataaatactatagcatctggggaacccacttccacacctactaccgaggcagtggagagcaccgtcgccactcttgaagacagtccagaggtcattgagagtcctcctgagataaacacagtgcaggtaacctctacagccgta

SEQ ID NO: 773 - DNA, 570 bp, synthetic construct
  source 1..570: mol_type = other DNA
atgatgaaaagtttctttttggtcgtaacaattcttgcattgacactgccattccttggcgcacaggaacagaatcaggagcaaccaattaggtgtgagaaggacgagaggttcttttctgataaaattgcaaaatacattcctatccaatacgtgctgtccagatacccaagctatggtttgaattattaccaacagaaacccgtagcactcataaataatcaattcttgccatacccatattacgccaagcctgccgcagttaggagtccagcacaaattctccaatggcaagtgctttctaatacagttccagccaagagttgtcaagcacaacctaccactatggctcgccaccctcatccacacctttcttttatggctatcccccccaaaaagaaccaagacaagacagagatcccaaccataaacactatcgcttcaggagagcctaccagcactccaacaacagaagctgtcgaatcaactgtggcaacactggaggactctcccgaggttattgagagtccacccgagatcaacactgtacaggtaacttctaccgctgta

SEQ ID NO: 774 - DNA, 570 bp, synthetic construct
  source 1..570: mol_type = other DNA
atgatgaaatctttcttcctggtggttactattcttgcactgacattgcctttcctcggcgcacaagagcagaaccaagagcaacccatacgttgcgaaaaggatgaacgctttttttccgacaaaattgccaaatatatacctatccaatatgtcttgtctcgctacccatcttatggacttaactactatcagcagaaaccagtcgctttgataaataatcagttcttgccatacccatactacgcaaagcctgctgctgttagatcccccgcccagattttgcagtggcaggtgctttccaatacagtgcccgcaaagtcatgtcaggcacagccaactacaatggctagacatccacacccccatctttccttcatggctataccccccaaaaagaaccaggacaaaactgaaatacccaccataaataccatagcaagcggggagcccaccagtaccccaaccaccgaagccgttgagagcacagtggctaccctcgaggatagcccagaggtaattgagagcccccctgaaataaataccgtgcaggttactagcacagctgtt

SEQ ID NO: 775 - DNA, 570 bp, synthetic construct
  source 1..570: mol_type = other DNA
atgatgaagagcttttttttggtagttaccatcctcgcccttaccctcccattccttggagcacaagagcagaatcaggagcagcctataaggtgtgagaaagatgaacgtttttttagtgataaaatagcaaaatatatccctatacagtatgttttgtctcgctacccatcctacggtctcaactactatcagcagaagcctgtagcacttattaacaaccaattcttgccatatccttattatgctaaacccgctgcagtgcgttcccccgcccagatactgcaatggcaggtactttctaatacagttccagctaagagctgccaagcacagccaacaactatggcccgccatccacatccacacttgagttttatggctatcccccccaaaaaaaatcaggataagaccgaaataccaaccatcaacactattgcatctggcgagcccacttcaactcctacaacagaggcagtggagtccacagttgctacccttgaagacagccctgaggtaatcgagtcacctcccgaaatcaacactgtgcaggttacatcaacagctgtt

SEQ ID NO: 776 - DNA, 570 bp, synthetic construct
  source 1..570: mol_type = other DNA
atgatgaagagcttcttcctggtcgtaacaatattggcactgactctccctttccttggggctcaagagcagaaccaagagcagcccatacgttgcgagaaagatgagagattcttctccgataaaatcgctaaatatatccccattcaatatgttcttagccgctatcctagttatgggctgaattactaccagcagaaacctgtagcactcatcaataaccagtttttgccctacccttactatgcaaaaccagcagccgtccgttctccagcacaaatactccagtggcaggtgctgtccaatactgtcccagccaaatcctgtcaggcacagcccactactatggcaaggcatccacatcctcatctctcttttatggcaataccccccaaaaagaaccaggataaaactgaaataccaactatcaacacaatagcatctggcgagcctacctcaaccccaactaccgaagcagttgagtccacagtggccacccttgaagacagccccgaggtgatcgagagccccccagaaatcaacaccgtacaagtgacttcaacagcagtg

SEQ ID NO: 777 - DNA, 570 bp, synthetic construct
  source 1..570: mol_type = other DNA
atgatgaaatcattttttttggtcgtaaccatactggctctcacactgcctttcctcggcgcacaagagcagaatcaagaacaaccaataagatgcgagaaagatgagaggttcttcagtgacaaaatagccaaatacattccaattcagtatgtgcttagtcgttatcccagttatggattgaattattaccaacaaaagccagtcgccctcataaacaaccagttcctcccttatccatattacgctaaaccagccgcagttagaagccctgcacaaatattgcagtggcaggtgctcagtaacaccgtcccagccaagtcatgccaagcacagccaacaactatggctaggcatccacacccccatctgagtttcatggctatcccccccaaaaaaaaccaggataaaacagaaatcccaactattaatactattgctagtggcgagcccacatcaacccccacaacagaagccgtggagtcaaccgttgcaaccttggaggacagtcccgaagttatagaatccccccctgagatcaacacagtgcaggttacttccaccgccgtt

SEQ ID NO: 778 - DNA, 570 bp, synthetic construct
  source 1..570: mol_type = other DNA
atgatgaagtcattcttccttgtagtcaccatcctggctctgactctccccttcctgggagctcaggaacaaaaccaggaacaaccaattagatgcgaaaaggatgagaggtttttttctgataagatagccaaatacataccaatacaatacgtgcttagtcgttacccttcttacggtttgaattattaccagcagaaacccgtcgcacttatcaataaccaattccttccatacccttactatgctaaaccagccgccgtccgttcccccgcacagatactccagtggcaagttctttctaacaccgtgcccgctaaatcatgccaggcacagccaacaaccatggcccgtcatccccacccccatcttagcttcatggcaattcctccaaaaaagaaccaggacaagaccgagatccccacaattaacactattgcctccggggaacccacctcaactcctactacagaggcagttgagtcaactgtggctaccttggaagactcacctgaagtcatcgaatcccccccagaaataaacactgtccaggtgacctcaaccgcagtc

SEQ ID NO: 779 - DNA, 570 bp, synthetic construct
  source 1..570: mol_type = other DNA
atgatgaagtccttctttctcgttgtgactatattggctctcacactgcctttccttggtgctcaggaacaaaaccaagagcagcccattcgctgtgaaaaggatgaaaggttctttagcgacaagatcgccaagtatataccaatacaatacgtccttagcagatacccatcatacggtcttaactattatcaacagaaacccgtggctttgatcaataatcaattccttccttacccttattatgctaagccagctgctgtcaggagtcccgctcaaattctccaatggcaagtcctctccaatactgtccccgcaaagtcttgtcaagcacaaccaacaactatggcccgtcaccctcaccctcatctctcctttatggctatccctccaaaaaaaaatcaggataagacagagatacctactattaacactatcgcaagtggagagccaacaagtacacccacaaccgaggctgtcgaaagcacagttgctaccctcgaagactctccagaagttatagaaagtccccccgagataaacacagtgcaggtaaccagcactgctgtg

SEQ ID NO: 780 - DNA, 570 bp, synthetic construct
  source 1..570: mol_type = other DNA
atgatgaaatcattctttctcgttgttaccattctcgccctcactctgccatttctcggcgctcaagaacaaaatcaagagcaacctattcgctgtgaaaaagatgaaaggttttttagtgataagattgcaaagtatattccaattcaatatgttctttctcgctacccaagttacggtttgaattattatcaacaaaagcccgtggctctcattaacaaccaattccttccatatccttactatgccaaacctgccgccgttagatcccccgcacaaattttgcagtggcaagtgctgagcaatactgttccagccaagtcttgccaagcacagcccaccacaatggcaaggcatccacatcctcacctgtctttcatggccatccccccaaaaaaaaatcaagacaagaccgaaattccaaccattaataccatagccagtggcgaacctacctctactcccacaacagaagccgtcgaatcaacagtagcaacactggaggatagccctgaggttatagagtcacccccagagattaataccgtgcaagtcaccagcaccgcagtc

SEQ ID NO: 781 - DNA, 570 bp, synthetic construct
  source 1..570: mol_type = other DNA
atgatgaagtctttttttttggttgttactatcttggctcttactctcccattcctcggcgctcaagagcagaatcaagaacaaccaataaggtgtgaaaaagacgaaagattcttttccgataagatcgccaaatatattcccattcagtatgtcctgtctaggtaccccagttacggacttaattactatcagcagaagccagtggccttgataaataatcaatttctcccttatccctattatgccaaaccagccgcagtaaggagcccagcacagattttgcaatggcaagttctctctaacactgtgccagcaaagagttgccaagcacagccaaccaccatggctagacacccccatcctcatttgtccttcatggctatccccccaaagaaaaaccaggacaagacagaaattccaaccattaacacaatcgcctctggtgagcctacatccactcctaccacagaggccgtcgagtcaactgtagctactctggaggactcacccgaggtaatagagtcacctcctgagataaacacagtccaggtaaccagtaccgcagtt

SEQ ID NO: 782 - DNA, 570 bp, synthetic construct
  source 1..570: mol_type = other DNA
atgatgaaaagtttttttcttgtcgtaaccatcctcgccctgaccctgccctttctgggggcacaggagcagaaccaggaacaaccaatacgctgcgagaaagatgagaggtttttttccgacaaaattgccaagtacattcccatacaatatgtgctgtcaagatatccaagctacggccttaactattatcagcagaaacctgtcgctttgataaataaccaattcctcccctatccttattatgctaagccagcagcagtcaggtcacctgcacaaatccttcagtggcaggtcctctctaacacagtccccgctaagtcctgtcaagcacagccaaccactatggcaagacatccacatccccacttgtcttttatggcaattccaccaaaaaagaaccaggataagaccgaaatccctactatcaataccatcgcctcaggtgaacctacttccactcctactactgaagcagtcgagagcactgtcgctactttggaggatagccccgaggtcattgaatcaccacccgagatcaatactgttcaggtcacttctactgccgtc

SEQ ID NO: 783 - DNA, 570 bp, synthetic construct
  source 1..570: mol_type = other DNA
atgatgaaatcctttttcctcgtcgtaacaatacttgctctgactttgcccttcctcggagcccaggaacaaaaccaagaacaaccaattagatgtgaaaaggacgagagatttttctccgacaagattgcaaagtatataccaatacaatatgttctttctcgttatccctcctacggattgaattattaccaacagaaacccgtggctttgataaataatcaattcttgccctacccatattacgcaaagcccgctgccgtgcgctcccctgcacaaatccttcagtggcaagttctgagtaacactgtccccgcaaaatcttgtcaggcccagcccactaccatggcacgccaccctcaccctcacctgtctttcatggcaatacctccaaagaaaaatcaggataaaaccgaaatccctacaattaacaccattgccagcggcgagcctacttccacccccacaaccgaagcagttgagtccactgtagcaacacttgaggactcaccagaggtcatcgagtcaccccctgaaataaacacagtacaggtaacaagtaccgctgtg

SEQ ID NO: 784 - DNA, 570 bp, synthetic construct
  source 1..570: mol_type = other DNA
atgatgaagtccttcttccttgtcgttaccatattggccctgactctgcccttcctcggggcacaggaacaaaaccaggaacaacctatccgttgcgaaaaagatgaaagatttttcagtgacaaaatagctaagtatatacccattcagtatgtcctgagccgctatccctcttacggcttgaactattaccaacaaaagcccgtagccctcataaataaccaatttctcccttacccctattatgctaaacctgctgccgtgagaagtccagctcagatattgcagtggcaagttctttctaataccgtccccgctaagagctgccaggcccagcctaccacaatggcccgtcaccctcatccccacctttctttcatggctatcccacccaaaaaaaaccaggacaaaacagagataccaaccataaataccatcgccagcggagaacctacatccacccccactacagaggcagtggaatcaacagttgccactctggaagacagtccagaagtaatcgagtcacctcctgaaatcaacacagtacaagtgacaagcactgccgtc

SEQ ID NO: 785 - DNA, 570 bp, synthetic construct
  source 1..570: mol_type = other DNA
atgatgaaatccttttttcttgtggtaacaattcttgccctgacactgccatttcttggcgcacaagaacagaatcaagagcagcccattagatgtgagaaagacgaacgtttctttagtgacaagatagcaaaatacatacctatacaatacgtcctgtcacgctatccttcttatgggcttaattattaccaacaaaagcctgttgccttgataaacaatcaatttctcccctacccatattacgccaagccagcagcagtccgcagtcctgcacaaatcctccaatggcaggttctgtccaacactgtacctgccaaatcctgtcaggcccaaccaaccacaatggcccgccatccccacccacatttgagtttcatggcaatacccccaaaaaaaaaccaagacaaaaccgaaatccccaccatcaataccatagctagtggggaaccaacctcaacacctaccacagaggctgttgagtcaaccgtggcaactctcgaggacagtccagaagtcatagagagccctcctgagataaacaccgtccaagtgacatccacagccgtg

SEQ ID NO: 786 - DNA, 570 bp, synthetic construct
  source 1..570: mol_type = other DNA
atgatgaaaagtttttttttggttgttactatccttgccctgaccctgccctttttgggtgctcaagagcagaaccaagaacaacccatacgctgtgaaaaagacgagcgctttttcagcgacaaaattgcaaaatatattcccatccagtatgtactctctcgttacccatcctacggacttaattattatcaacaaaagcctgttgctctgataaacaaccagttccttccttatccatactatgcaaaacccgccgctgtacgctcacctgcacaaatcctgcagtggcaggtactttctaataccgtgcccgctaagtcttgtcaagcacaaccaactactatggcaaggcatccacatcctcatctgtcttttatggctatacctcctaagaagaaccaggacaagacagagatcccaactatcaacaccatagcttctggtgaacccacctccactcctaccacagaagctgtcgagtcaacagtggccactcttgaggactccccagaagtgatagaaagcccccccgagatcaatacagtacaggttacaagcactgccgta

SEQ ID NO: 787 - DNA, 570 bp, synthetic construct
  source 1..570: mol_type = other DNA
atgatgaagtcctttttcctcgttgtaactattcttgccctcactctcccatttctgggggctcaggagcaaaatcaagaacaaccaatacgttgtgaaaaagacgaacgttttttctctgataaaatagcaaagtacatacccatacaatatgtactgtctcgttacccaagctatgggcttaattactatcagcaaaaacctgtcgctctgattaacaaccagttccttccatatccatattacgcaaagccagccgctgttagatcacccgcccaaatactgcaatggcaggtactgtctaacactgtccctgctaagtcttgtcaagcacagcccacaacaatggccaggcacccccacccccatttgtcctttatggccataccaccaaagaaaaatcaggataagaccgagattccaactatcaacacaatagcttctggagaaccaacctctacccctactaccgaggctgttgagtcaactgtagccactttggaagactcacctgaggtgatcgaaagtcctcctgagataaatacagtacaggtgacatcaacagctgtg

SEQ ID NO: 788 - DNA, 570 bp, synthetic construct
  source 1..570: mol_type = other DNA
atgatgaaatccttcttcctcgttgttaccattttggcccttactttgccctttcttggggctcaggaacaaaatcaggaacagcccatcaggtgtgagaaggatgagcgctttttctcagacaagatcgcaaaatatattcctatccagtacgtgttgtccaggtatccatcctatggattgaactattaccagcaaaaaccagtagcactcataaacaaccaattcttgccttacccctactacgctaagcccgccgccgtgcgctcaccagctcagatcctgcagtggcaggtcttgagtaatacagtgcctgccaaatcctgtcaggcccaacccactacaatggccagacacccccatccacacctcagctttatggctatacctcccaaaaagaaccaagataagaccgagattcccactataaatacaatagcaagtggagaacccacttctacccccactaccgaggctgtagagagcacagttgccactctggaagactcacctgaagttatcgaatctccaccagaaattaacacagtacaggtgacctcaaccgcagtt

SEQ ID NO: 789 - DNA, 570 bp, synthetic construct
  source 1..570: mol_type = other DNA
atgatgaagagtttcttccttgtagtgacaattctcgcacttactctcccattccttggcgcacaagaacaaaatcaagaacagccaatccgctgtgaaaaagatgaacgctttttttctgacaagatagctaagtatatcccaatacagtacgtcctcagccgttaccccagttacggattgaattattaccagcagaagcccgtcgccctcataaataatcagtttttgccttatccatactacgctaaacccgctgcagttagatccccagctcagattctgcagtggcaggtgctttctaacactgtacctgccaagagttgtcaagcacagccaaccactatggctcgtcacccacatcctcacctttcattcatggctattccccctaaaaaaaatcaggataaaactgagatacctaccataaacaccattgcaagtggagaaccaacatctactcccaccactgaggccgtcgagtctacagtggctactctggaagatagccccgaagtaatagaatcccctcccgaaattaacacagtacaggtgacctccaccgctgtc

SEQ ID NO: 790 - DNA, 570 bp, synthetic construct
  source 1..570: mol_type = other DNA
atgatgaagagttttttcctcgttgtgactatcctcgcacttacactcccattcctgggagcacaggagcaaaaccaggagcagcctatcaggtgcgagaaagatgagaggttttttagtgataagatagcaaaatatattccaatacaatacgtgctgtctcgctaccccagttacggtcttaattattaccagcaaaaaccagtagcccttattaacaatcagttcctgccttacccatattatgccaaacccgccgctgtacgcagtcctgcccagatactccaatggcaagtcttgagtaacaccgttcctgccaaaagttgccaagcacagcctactactatggctagacaccctcatccccacctttcctttatggcaatccctccaaaaaaaaatcaggacaagaccgagattcccacaattaacactatcgcctcaggggagcctacttctacacctaccaccgaggcagtcgaatccactgtggcaaccctggaggattctcccgaagtgatcgaaagcccacccgagataaatactgtccaggttacaagtactgctgta

SEQ ID NO: 791 - DNA, 570 bp, synthetic construct
  source 1..570: mol_type = other DNA
atgatgaagtctttctttcttgttgtgaccattttggctcttaccttgcctttccttggcgctcaagaacaaaaccaagagcaaccaatacgttgtgagaaggatgaacgctttttctcagacaagatagcaaaatacataccaatccaatatgtactttctcgttatcccagctatggtctcaactactaccaacaaaagcccgtagccttgataaataaccagttcttgccctatccttattatgccaagcccgccgccgtccgttcaccagcccaaattctgcaatggcaagtcctgtcaaataccgtcccagctaagtcctgccaggcacagccaaccactatggccaggcaccctcatccacatctctcattcatggctataccacctaagaagaaccaagataaaactgagatcccaacaattaataccatcgcttccggggagcctacttcaacaccaacaaccgaagctgtagagtcaacagttgctacactggaggacagcccagaggtcattgagagtccacctgagataaatactgtgcaagtgactagcaccgccgtc

SEQ ID NO: 792 - DNA, 570 bp, synthetic construct
  source 1..570: mol_type = other DNA
atgatgaagtcattttttcttgtcgtcactatccttgctttgacccttccatttctcggcgcacaggagcagaaccaagaacaaccaatccgctgtgaaaaggacgagaggttcttcagtgacaagatagccaagtacatcccaatacagtacgtgctcagtcgctatccctcctacggtctcaactactatcaacaaaaacctgtcgcactgataaataatcagtttctgccttacccttactatgcaaaacccgcagcagtgagatccccagcccaaatccttcaatggcaggtgcttagtaataccgtgcccgccaaaagttgccaggctcagcccacaacaatggctagacatcctcacccacaccttagttttatggccataccacccaagaaaaatcaagataagactgaaataccaaccatcaatactatagccagtggggagcctacatcaactccaactacagaagccgtcgaatctaccgtcgctacccttgaagattcccctgaagtaatcgagagtcccccagagataaataccgtacaagtgacatctacagccgtt

SEQ ID NO: 793 - DNA, 570 bp, synthetic construct
  source 1..570: mol_type = other DNA
atgatgaagagttttttcctcgttgtgacaatattggcacttaccttgccttttctgggggcacaagagcagaaccaggaacagccaattaggtgcgagaaagatgaaaggttcttttcagacaagattgctaagtatattcctattcaatacgtgctgagtagatatccctcctacggcttgaactactatcaacaaaaacccgttgcccttatcaacaatcagtttcttccctacccatattatgcaaagcctgctgccgtaaggagccctgcccaaatccttcaatggcaggttctgagtaatactgtgcctgcaaagtcatgccaggctcaacccactactatggctcgtcatcctcatccccatctttcctttatggcaatcccccctaaaaaaaaccaggacaagactgagatcccaacaattaacaccatagcctctggtgagcccacctcaaccccaaccactgaggccgtagaatctaccgtagccacactcgaagattcccccgaggtaatagagagccccccagaaatcaatacagttcaagtaacttcaacagcagtt

SEQ ID NO: 794 - DNA, 570 bp, synthetic construct
  source 1..570: mol_type = other DNA
atgatgaaatcattctttctcgtcgttacaattttggcacttactttgccattcttgggcgctcaggaacagaatcaagagcaacccatccgctgcgagaaggatgaaaggtttttttcagataaaatcgccaagtacatacctattcagtacgttcttagtagataccctagttatggtctcaattactaccagcaaaaaccagtagccctgattaataaccaatttctcccatatccttattacgctaagccagccgcagttcgctcacccgcacaaattctgcaatggcaggttctttccaacactgttcccgcaaaatcatgccaggctcagccaactaccatggctcgccatcctcacccacacctctcttttatggctattcccccaaagaagaatcaggacaaaactgaaatacccactatcaataccattgcttctggtgaacctacttcaactcctactaccgaggctgtggagagcactgtcgcaactctcgaagatagccctgaggtcattgaaagtcccccagagattaataccgtccaagtaacaagtactgctgtc

SEQ ID NO: 795 - DNA, 570 bp, synthetic construct
  source 1..570: mol_type = other DNA
atgatgaagtctttttttttggttgtcaccatactcgcactgaccttgcccttcttgggagcacaggagcaaaaccaagagcagcccattcgttgcgaaaaggatgagaggtttttctctgataaaatagctaaatatatacccattcaatatgttcttagtcgttatccaagttatgggttgaactattatcaacaaaagcctgtagctctgataaataatcagttcctgccctacccatattacgcaaagcccgcagcagtccgtagtcctgcacagatactccaatggcaagttctcagcaacactgtaccagccaagagctgccaagcacagcctaccacaatggctcgccacccacacccccacctttcttttatggctatcccacctaaaaaaaatcaggacaaaaccgagattcctacaataaatactatcgcatctggagaacctacaagcacacccactactgaagccgttgagagcacagttgctacccttgaggatagccccgaggttatcgaatcaccccctgagatcaacaccgttcaggtgacaagtactgcagtc

SEQ ID NO: 796 - DNA, 570 bp, synthetic construct
  source 1..570: mol_type = other DNA
atgatgaaaagttttttcttggtggtgactatacttgcacttactttgccattcctcggagcccaggaacagaaccaagagcagccaataagatgcgaaaaagatgaacgctttttcagcgataagatcgcaaagtatatacccatccaatacgttctctcacgttacccctcttatgggctgaactattatcagcagaaacccgtagccctcattaacaaccagttcttgccatacccatactacgcaaagcctgctgctgttaggtccccagcccaaatactgcagtggcaggtgttgagtaataccgtgccagcaaagagctgccaggcacaaccaaccacaatggctcgtcatccccacccacatttgtcattcatggctatacctcccaagaagaatcaggacaagactgagatccccactatcaatactattgcttcaggtgagccaacatccacacccactacagaggctgtcgaaagcactgtcgctacccttgaagacagccctgaagtcatcgagtcccctcccgaaattaacaccgtacaggtcactagtacagcagtc

SEQ ID NO: 797 - DNA, 570 bp, synthetic construct
  source 1..570: mol_type = other DNA
atgatgaaatccttttttctggtagtcaccatcttggccttgaccttgccattccttggagcacaggaacagaatcaggagcaaccaataaggtgtgaaaaagatgagaggttctttagcgataagatagccaaatacatccccatacaatatgtcctctcccgttatccaagttatggcctcaactactaccagcagaagccagttgctcttataaataatcagtttctgccttatccatattacgcaaagccagcagccgtccgctctccagcacaaatacttcaatggcaagtgctgtccaataccgtccctgcaaagtcctgccaagctcaacccaccacaatggctcgtcatccccatccccacctgagtttcatggcaattccacccaaaaaaaatcaagacaagaccgagataccaacaattaacaccatagcctcaggagaacctacttctacacccaccacagaggccgtcgagtccacagttgcaaccctcgaagacagtccagaagtaatcgaaagtccacccgaaataaacacagtgcaggttacaagtacagcagtg

SEQ ID NO: 798 - DNA, 570 bp, synthetic construct
  source 1..570: mol_type = other DNA
atgatgaagagtttctttcttgtcgtaacaatactcgctcttaccctgccttttctgggagcacaagagcagaaccaagagcagcccatcagatgcgaaaaagacgaacgttttttcagcgacaagattgcaaagtacatccccatccaatacgttcttagcaggtatccctcctacgggttgaattactaccaacagaagccagtggccttgattaacaatcaatttctgccatatccctattacgcaaagccagccgccgtgaggtcacctgcccaaattctccagtggcaggtactcagtaacacagtccccgcaaaatcttgtcaggcacaaccaaccacaatggccaggcacccacacccccatctttcctttatggcaatcccacctaagaaaaaccaagataagaccgagattcctaccataaataccattgcatccggcgaacctaccagcacacccacaaccgaagctgtcgagtctacagtagccacactcgaggacagccctgaagtaatagaatctcctccagaaatcaacacagtacaggtcacttcaactgccgtc

SEQ ID NO: 799 - DNA, 570 bp, synthetic construct
  source 1..570: mol_type = other DNA
atgatgaagtccttttttctggtagtgaccattctcgcattgactttgccctttcttggagctcaggaacaaaatcaggagcaaccaattaggtgtgaaaaagacgaaaggtttttttccgataagatcgctaaatacattccaatccaatacgttcttagtaggtatccatcttatggtttgaactattatcaacagaagcctgtggctcttataaataaccaattcctgccttacccatactatgcaaagcctgctgctgtcagaagtccagctcagatacttcaatggcaagtcctgtccaataccgtgcctgctaaatcctgccaggcacaacctaccacaatggctaggcaccctcacccacacctcagcttcatggctatcccccccaaaaaaaaccaggataagactgagattccaaccattaacactattgcctctggtgagcctacatccacccctactactgaagcagtggaatccaccgtcgcaaccctcgaagactctcccgaagtgatcgagagccctcctgaaataaacacagtacaggtcacatctaccgcagta

SEQ ID NO: 800 - DNA, 570 bp, synthetic construct
  source 1..570: mol_type = other DNA
atgatgaagtctttctttctggttgttaccattctcgccctcacccttccattcctgggtgcccaagaacagaatcaagagcaacccatacgttgcgaaaaagacgagcgtttcttttctgataaaatagctaagtatatccccattcaatacgtcttgtctcgctatcccagttatggcctgaactattatcaacaaaagccagtagctctcataaacaaccagttcttgccttatccatactacgctaaacctgccgctgttcgttcacctgcccagatccttcagtggcaggtactgtctaataccgtaccagctaagtcctgtcaagcccagccaacaactatggctcgccatcctcatcctcacctctctttcatggctataccccctaaaaagaatcaggataaaactgaaattcccaccattaatacaatcgcatcaggtgaaccaaccagtacccccaccacagaagccgtagaatctacagtggccactttggaagacagccctgaagtcattgagtcacctccagagatcaatacagtacaggtgacatctacagccgta

SEQ ID NO: 801 - DNA, 570 bp, synthetic construct
  source 1..570: mol_type = other DNA
atgatgaaatcattttttctcgtggttacaatccttgctctgacattgccatttcttggagctcaagagcagaaccaggaacaaccaatacgttgtgagaaggacgaacgtttcttctccgacaaaattgcaaagtatatccctatacagtatgttctgtctaggtatccaagctacggcttgaactactatcagcaaaagcccgtagctctcatcaacaaccagttcctgccttacccatattacgctaaaccagcagcagtccgctcccccgcccaaattttgcagtggcaggtccttagcaacactgtccctgcaaagtcatgccaggcacaaccaactacaatggcacgccacccacacccccatttgtcattcatggcaatcccacccaaaaaaaatcaggacaagacagagattcctactataaatactatcgcatctggtgagccaacctcaactccaactacagaagctgttgaaagtaccgtagccaccctggaggactctcctgaggtgatcgaaagtccccccgaaataaacacagttcaggttacttccactgccgtg

SEQ ID NO: 802 - DNA, 570 bp, synthetic construct
  source 1..570: mol_type = other DNA
atgatgaagtcctttttcctggttgtcacaatacttgcccttaccctgcctttccttggagcccaagagcagaaccaagagcagccaatccgttgtgaaaaggacgagaggttttttagtgacaaaattgccaagtatatccctatacaatatgttctgagtaggtacccatcctacgggttgaattactatcagcagaagccagtggctttgataaacaaccagttcctgccatatccatactatgccaagcccgccgcagtgcgctctcctgcccagattttgcaatggcaggttctgtcaaacaccgtccccgcaaagtcatgtcaagcccagcctactactatggcacgtcatcctcatccccacttgtctttcatggccattcctcccaaaaaaaatcaagacaaaactgaaatcccaactattaacactattgcatccggggaacccacatccaccccaacaactgaagcagttgaatcaactgtagcaaccttggaggactccccagaagttatagagtctccacctgaaattaacacagtacaggtgacatcaacagccgta

SEQ ID NO: 803 - DNA, 570 bp, synthetic construct
  source 1..570: mol_type = other DNA
atgatgaagtctttctttcttgtagtaacaattctcgctcttaccctgccatttctgggggctcaggagcagaaccaagagcaaccaataaggtgtgagaaggacgagagattttttagtgacaagattgctaagtacatccccattcaatatgtcctgtctcgttacccatcttatggacttaactattatcagcagaaaccagtcgccctgattaacaatcaattcttgccatacccatactacgctaagcccgccgcagtacgcagcccagcccagatattgcaatggcaagttctttcaaacactgtgccagccaaaagctgtcaggctcagccaaccactatggcacgccatcctcacccccacctctcattcatggccatcccccctaagaaaaaccaagataaaaccgagatacctacaatcaataccatagcatctggcgaacccactagcacccccacaaccgaggctgtcgagagcactgtggcaactcttgaggattctccagaggtaatcgaaagccctccagagatcaatactgttcaagttacctctacagccgtt

SEQ ID NO: 804 - DNA, 570 bp, synthetic construct
  source 1..570: mol_type = other DNA
atgatgaaatcattttttcttgtcgtcacaattctggccttgacattgcccttcttgggcgcacaagagcaaaaccaagaacagcccattcgctgcgagaaagatgagaggttcttttctgataaaatagctaaatatatacccattcaatacgttctgtcccgctatccaagttatggtcttaattactatcaacaaaaacccgtggcccttattaataatcaattcttgccctatccatattatgccaagcctgccgccgtgagatcacctgcccaaatacttcagtggcaagtcctctccaatacagttcctgccaaaagctgtcaagcacagcctaccactatggcaaggcatccacatccacaccttagttttatggccattccacccaagaagaaccaggataagacagaaatccctaccattaacaccattgcatctggggaaccaacatctactcctactactgaggcagttgagagcaccgtcgctactctggaagatagtccagaggttatcgaatcccctcccgaaatcaacaccgtacaggttacttctaccgccgta

SEQ ID NO: 805 - DNA, 570 bp, synthetic construct
  source 1..570: mol_type = other DNA
atgatgaagagttttttcctagttgtgactatcctagcattaaccctgccatttttgggtgcccaggagcaaaaccaagagcaacctattcgttgtgaaaaagacgagagattttttagtgataaaattgcaaagtacatcccaatccagtacgttttaagtagatatcccagctacggtcttaattactatcaacagaagccagttgccttgataaacaaccagtttctcccatatccctactatgctaagcctgccgccgtccgttctcctgctcagatattgcagtggcaggttttatccaacactgtcccagccaagtcttgccaggcacaacccaccaccatggctagacacccacatccacacctttcctttatggctattcctcccaaaaagaaccaagacaagacagagatccccaccataaatactatcgcttctggtgagccaacttcaacacctactactgaagctgtggagagcactgtcgccacacttgaagattccccagaggtgattgaatcaccccccgagataaacacagtacaggtcacctcaactgctgta

SEQ ID NO: 806 - DNA, 573 bp, synthetic construct
  source 1..573: mol_type = other DNA; note = Kappa wild type
atgatgaagagttttttcctagttgtgactatcctggcattaaccctgccatttttgggtgcccaggagcaaaaccaagaacaaccaatacgctgtgagaaagatgaaagattcttcagtgacaaaatagccaaatatatcccaattcagtatgtgctgagcaggtatcctagttatggactcaattactaccaacagaaaccagttgcactaattaataatcaatttctgccatacccatattatgcaaagccagctgcagttaggtcacctgcccaaattcttcaatggcaagttttgtcaaatactgtgcctgccaagtcctgccaagcccagccaactaccatggcacgtcacccacacccacatttatcatttatggccattccaccaaagaaaaatcaggataaaacagaaatccctaccatcaataccattgctagtggcgagcctacaagtacacctaccaccgaagcagtagagagcactgtagctactctagaagattctccagaagttattgagagcccacctgagatcaacacagtccaagttacttcaactgcagtctaa

SEQ ID NO: 807 - DNA, 30 bp, synthetic construct
  source 1..30: mol_type = other DNA
cctcaggagtctcagaagagagctgtggct

SEQ ID NO: 808 - protein, 10 aa, synthetic construct
PQESQKRAVA

SEQ ID NO: 809 - DNA, 642 bp, synthetic construct
  source 1..642: mol_type = other DNA
atgaaacttctcatccttacctgtcttgtggctgttgctcttgctaggcctaaacatcctatcaagcaccaaggactccctcaagaagtcctcaatgaaaatttactcaggttttttgtggcaccttttccagaagtgtttggaaaggagaaggtcaatgaactgagcaaggatattgggagtgaatcaactgaggatcaagccatggaagatattaagcaaatggaagctgaaagcatttcgtcaagtgaggaaattgttcccaatagtgttgagcagaagcacattcaaaaggaagatgtgccctctgagcgttacctgggttatctggaacagcttctcagactgaaaaaatacaaagtaccccagctggaaattgttcccaatagtgctgaggaacgacttcacagtatgaaagagggaatccatgcccaacagaaagaacctatgataggagtgaatcaggaactggcctacttctaccctgagcttttcagacaattctaccagctggatgcctatccatctggtgcctggtattacgttccactaggcacacaatacactgatgccccatcattctctgacatccctaatcctattggctctgagaacagtgaaaagactactatgccactgtgg

SEQ ID NO: 810 - DNA, 666 bp, synthetic construct; identical to SEQ ID NO: 401
  source 1..666: mol_type = other DNA

SEQ ID NO: 811 - DNA, 570 bp, synthetic construct
  source 1..570: mol_type = other DNA
atgatgaagagttttttcctagttgtgactatcctggcattaaccctgccatttttgggtgcccaggagcaaaaccaagaacaaccaatacgctgtgagaaagatgaaagattcttcagtgacaaaatagccaaatatatcccaattcagtatgtgctgagcaggtatcctagttatggactcaattactaccaacagaaaccagttgcactaattaataatcaatttctgccatacccatattatgcaaagccagctgcagttaggtcacctgcccaaattcttcaatggcaagttttgtcaaatactgtgcctgccaagtcctgccaagcccagccaactaccatggcacgtcacccacacccacatttatcatttatggccattccaccaaagaaaaatcaggataaaacagaaatccctaccatcaataccattgctagtggcgagcctacaagtacacctaccaccgaagcagtagagagcactgtagctactctagaagattctccagaagttattgagagcccacctgagatcaacacagtccaagttacttcaactgcagtc

SEQ ID NO: 812 - DNA, 672 bp, synthetic construct
  source 1..672: mol_type = other DNA
atgaaggtcctcatccttgcctgcctggtggctctggcccttgcaagagagctggaagaactcaatgtaccgggtgagattgtggaaagcctttcaagcagtgaggaatctattacacgcatcaataagaaaattgagaagtttcagagtgaggaacagcagcaaacagaggatgaactccaggataaaatccacccctttgcccagacacagtctctagtctatcccttccctgggcccatccctaacagcctcccacaaaacatccctcctcttactcaaacccctgtggtggtgccgcctttccttcagcctgaagtactgggagtctccaaagtgaaggaggctatggctcctaagcacaaagaaatgccctttcctaaatatccagttgagccctttactgaaagccagagcttgactttgactgatgttgaaaatcttcatttgcctcctctcttgctccagtcttggatgcatcagcctcaccagcctcttcctccaactgtcatgtttcctcctcagtccgtgctgtccctttctcagtccaaagtcctgcctgttccccagaaagcagtgccctatccccagagagatatgcccattcaggcctttctgctgtaccagcagcctgtactcggtcctgtccggggacctttccctattattgtc

SEQ ID NO: 813 - DNA, 614 bp, synthetic construct
  source 1..614: mol_type = other DNA
atgaaaatgattctggtgcgcagattccgcgtgctcatcctgatggccttcctggcggcttgcgcgctgcacctcgtgctggatctgctgcccaagctggagcggagcgccgcgcggccctcgggggagcccggctgctcctgcgcgcagcccgcggcggaggcggcggcccccggctgggcccaggcgcgcggacaccccggaggggagctggaggccgcagcctccgccgccggcgacgcgggctggcccaacaagcacacgctgcgcatcctgcaggacttcagctccgacccttcctccaatctcacatcccactcgcttgagaaactgccccccgcagccgaagcggccgagggcgccccgccggggcaggatcctggagtccggcgccccccagatccggctcaccggccgctcccccgcgaccccggcccgcgtggacctgtgctgccccctggcctgagcggggacggctccctcctaaccaggctgttccagcacccactgtaccaggtccccattccacctctaacggagggcgatgtcctcttcaacgtgaacagtgacatcaggttcaaccccaaggcagcgacggcggagaacccagactg

SEQ ID NO: 814 - DNA, 1674 bp, synthetic construct
  source 1..1674: mol_type = other DNA
ttgttgcctaaacttgagagaagtgcagctagaccctctggcgaacccggttgtagctgcgctcagcctgcagcagaggcagccgcccctggttgggcacaggctaggggtcatcccggtggtgaactcgaagcagccgccagtgctgctggagacgcaggttggcccaataaacatactctgaggattcttcaggatttctcatccgatccaagctccaatttgactagccacagtctcgaaaaactcccacctgcagcagaagctgcagaaggcgctccaccagggcaagatcccggtgtgaggagacctcccgatcctgctcaccgtcccttgccccgcgaccctggcccaagaggaccagtgcttcctcccggcctgtctggggatggatcccttttgactcgcctcttccagcaccctttgtatcaggtccccatacctccattgacagagggagacgtactgtttaatgttaattcagatattaggttcaatcctaaagccgctacagccgagaatcccgattggccccatgaagggccagaagatgaatttttgccaacaggagaggcagcagtcgatagctatcccaactggttgaagttccatataggtataaaccgttacgagttgtacagcagacacaaccccgctgttggggcccttctccaagacttgggaacccaaaagattaccagcgtagccatgaaatccggggggacacagctgaagttgataatgacattccaaaattacgggcaggcactttttaagcccatgaaacagacacgtgaacaggagactccaccagactttttttattttagcgattatgaaagacacaatgctgaaatagcagcctttcatctcgatcgcatcctggatttcaggagagttccacccgtggctggaagactggttaacatgacaaaagagattcgtgatgtgacacgtgacaaaaaactctggcgcacatttttcatctcaccagcaaataatgtgtgtttttatggtgagtgttcctattactgcagtactgagcacgccctgtgtgggaaacctgaccaaatcgaaggttctcttgcagcattccttccagacctcgcactggctaagcgtaaaacttggcgcaatccttggagacgcagctatcacaaacgtaaaaaagctgagtgggaggtcgatcccgactattgcgaagaagtgaggcagacccccccttacgacagttcacataggctgctggatgtcatggatatgactattttcgatttcttgatggggaacatggatcgccaccactatgagacatttgagaaattcggcaacgaaacattcatcatacacctggataatgggaggggatttggcaaacactcccatgatgaactctcaatcttggtgcccctgcaacagtgttgtcgcatcagaaggagcacttacttgagactccaactgctggcacaggaggaacacagattgtcacttcttatggccgaagcacttagagccgatcgtgttgcaccagtcctttttcaaccccacctggaagccttggatcgtcgcctccgcatcgtactcagagctgtcggagactgcgtagagaaagatggattgcacagtgtcgtagaagacgatctcggaccagaacaccgtgccgcagcaggccgt

SEQ ID NO: 815 - DNA, 1758 bp, synthetic construct
  source 1..1758: mol_type = other DNA
atgaagatgatattggtccgcagatttagggttctgatccttatggcattccttgcagcatgtgcattgcatcttgtattggacctgctccctaagcttgaacgctctgctgctcgcccctccggagaaccaggctgtagttgcgcacaacctgctgcagaggccgccgctcctggctgggctcaggctcgcggacacccaggtggagaacttgaagctgcagcttccgctgccggtgatgctggctggcccaacaagcacacactcagaatacttcaggatttcagtagtgacccatcttccaatctcactagccacagccttgagaagctgcctcccgcagcagaggcagcagaaggggcccctcccgggcaagatcccggggtaaggcgtccaccagatccagcccacagaccccttccacgtgaccctggacccagggggcccgttcttcctccaggtctttccggcgacgggagcctcctgactagactctttcagcatcctctctaccaagtccctatccctcctttgaccgagggcgacgttctgtttaatgttaattccgatattagatttaatccaaaggcagccaccgccgagaatcccgattggccccacgaagggcccgaagatgagtttcttcccaccggtgaggctgctgtcgactcttatccaaattggctgaagttccatatagggatcaatagatatgaactctacagtagacacaaccctgctgtaggggcactcttgcaggacctcggtacacagaaaataacatcagtggccatgaagtccggaggcacccagctcaaattgatcatgacatttcagaattatggacaagctttgtttaagcctatgaagcagacaagggagcaggaaacacctcctgatttcttttattttagcgactatgaaaggcataacgctgaaattgcagcattccatttggatcgtattctggatttcaggagggttccacccgttgctgggagactggtgaacatgacaaaggagatacgcgatgtcaccagagataagaagctctggcgcactttctttattagcccagcaaacaatgtttgtttttatggagaatgttcttactattgcagcactgagcatgccctctgtggaaagcctgatcaaatagagggctccctcgctgccttccttcccgatctggcacttgctaaaagaaagacctggagaaacccctggcgccgctcttatcataagcgtaagaaagctgaatgggaagtcgaccccgactactgcgaagaggtacgccagacaccaccttatgattcaagccatcgtctcctcgacgttatggacatgactattttcgatttcttgatgggcaatatggaccgtcatcactatgaaacctttgagaaatttggtaatgagactttcattatacatctggacaatgggcgcgggtttgggaaacactctcatgacgagctgagtattcttgtaccattgcagcagtgctgccgcataagaaggtctacctatttgaggctccaactcctggctcaggaggaacatcgtctctccttgctgatggccgaggccttgagggcagacagagtggctcccgtacttttccaaccccacctggaagctctcgataggcgcctgcgtattgtccttagggcagtgggggattgtgtggaaaaagatgggctccattctgtagtggaagacgacctgggcccagaacatcgcgcagccgcagggagg

SEQ ID NO: 816 - DNA, 1758 bp, synthetic construct
  source 1..1758: mol_type = other DNA
atgaagatgattttggtccgtaggtttagagttcttatcctcatggcatttctggcagcatgtgctcttcatcttgttctcgacctgctgcctaaattggaaaggtccgctgccaggcctagcggcgagcctgggtgttcatgcgcccagcctgccgcagaggctgctgctccaggatgggctcaggcacgtggacatccaggtggtgagctcgaagcagcagccagcgcagctggtgacgccggctggcccaacaagcatacactgagaatcctccaggattttagcagcgatcccagttccaacctcacttcacactcccttgaaaagctgccccctgctgcagaggctgcagagggggctcctccaggacaagaccccggtgtgcgtagaccacctgacccagctcaccgtccacttcccagagatccaggtccacgtggtcccgtgctccctcctgggctctcaggagacgggtcactgcttacccgtctttttcagcatcccttgtaccaggttcccattccccctcttaccgagggtgatgtcctgttcaacgtgaattctgatataagattcaatcctaaagcagcaactgctgagaatcccgattggcctcatgaaggccccgaagatgagtttctgccaacaggcgaggcagctgtggattcctacccaaattggctgaaatttcacataggcatcaatcgttatgaactgtactctcgtcataatcccgctgttggtgcacttctccaggacctgggcactcaaaaaattacctccgtggctatgaagtctggtgggacccagcttaaactgataatgacattccaaaactatggacaagctttgttcaaacctatgaaacaaactcgtgaacaagaaacaccacctgacttcttctatttctccgactatgaaagacacaatgcagagatagccgcctttcatctcgacaggattctcgacttccgtcgtgtgccaccagtggctggccgtcttgtgaacatgacaaaagaaatacgcgacgtaacaagggacaagaagctttggcgcacatttttcatctcccctgccaataacgtgtgcttctacggagaatgcagttattattgctctactgagcatgccctgtgtggaaaaccagatcaaatagaaggatcactcgccgctttcctccctgacttggctcttgctaagagaaaaacatggcgcaacccatggcgtaggtcctaccacaaaaggaagaaggctgagtgggaggtagatcccgactactgcgaggaagttagacagacccccccttatgacagcagtcatcgtctgctcgatgtgatggacatgaccatctttgactttttgatgggaaacatggacagacatcactacgagactttcgagaagttcggtaatgaaacatttataattcatctggataatgggcgcgggtttggcaagcattcccatgacgaattgtccatccttgtacctcttcaacagtgttgcaggatccgcaggtcaacctacttgcgcctccaactccttgctcaggaggagcacagacttagcctgctgatggcagaagcactgagagctgaccgtgtagctccagtgctttttcagccacacctggaagcccttgacaggcgcctgaggattgttctccgcgccgtcggcgactgcgttgagaaagatggcctgcacagtgtagtcgaggatgatcttggcccagagcacagagctgccgcaggtcgc

SEQ ID NO: 817 - DNA, 1758 bp, synthetic construct
  source 1..1758: mol_type = other DNA
atgaaaatgattcttgtacgtcgctttagagtacttatactgatggcatttttggctgcctgcgcattgcatcttgtactggacttgctgcctaagcttgaaagaagcgccgccaggccatctggcgagcctggctgttcttgcgcccaaccagctgcagaggctgcagcacccgggtgggctcaagcaagggggcatcccggcggcgagctggaagctgccgcatccgccgctggcgacgccggttggccaaacaaacacacacttaggatcctgcaggatttttcttctgatccttcttcaaacctgacatctcactcactggaaaaactgccacctgccgcagaggctgccgagggagcaccacctggacaagatccaggggtgcgtagaccacctgatccagctcataggccactcccaagagatccaggcccccgtggaccagtcctgcctcccgggctcagcggtgacggaagcctcttgactcgtctctttcaacaccctttgtatcaggtccctataccaccactgacagaaggcgatgtgctgttcaacgtcaatagcgacatacgttttaatcctaaggccgcaaccgcagagaaccccgattggcctcacgagggacctgaggacgaattcttgccaactggtgaagcagcagtagactcctaccccaactggctgaaattccacataggaatcaacaggtacgagctctattctagacacaatcctgcagttggggcccttttgcaagatctggggacccaaaaaatcacatccgtcgcaatgaaaagtggaggtacacagcttaaactcattatgacctttcaaaactatggtcaagctctctttaaaccaatgaaacagactagagaacaagagactccccctgactttttttactttagtgactatgagagacataatgcagagattgctgcttttcatctggatcgcatcctggacttccgccgcgtaccaccagttgccgggcgccttgtaaacatgacaaaagagataagagacgtcactagagataaaaagctctggcgcactttcttcatctctccagccaataacgtgtgcttttatggcgaatgctcctattattgctcaactgaacatgccctttgtggcaaacccgatcagattgaagggtctttggctgcattcctcccagatttggctctggcaaaaagaaagacttggcgtaatccatggcgtcgtagttaccataagagaaaaaaggctgagtgggaggttgaccctgactactgtgaggaggtccgccaaacccccccatacgacagttcacatcgtctgttggacgtcatggatatgacaatatttgattttttgatggggaatatggaccgccaccactatgaaacattcgaaaagtttggtaacgagaccttcatcatacacctggacaatggacgtggttttggtaaacactcccacgacgaactgagcattttggtaccacttcaacagtgctgtagaatacgccgttccacatacctgagactccaattgctggcacaagaagagcaccgtctctccctgcttatggcagaggctctgagggcagaccgcgtcgctccagtgttgttccaaccacacctggaagccctcgaccgtcgcttgcgtatcgttcttcgcgcagttggggactgtgtagaaaaagacggcctgcatagtgtcgtagaggacgacctcggtcccgaacatagggcagctgctggtagg

SEQ ID NO: 818 - DNA, 1758 bp, synthetic construct
  source 1..1758: mol_type = other DNA
atgaaaatgattctcgtgaggagattccgtgttctgatcctcatggccttcctggcagcttgcgctttgcaccttgtgcttgacctgcttccaaaacttgaacgctctgctgctagacctagcggtgaaccaggctgtagctgcgctcagcccgcagccgaagcagccgctccaggatgggcacaagcacgtggacatcccgggggcgaactggaagcagctgcatcagccgccggagacgcaggatggcccaataagcacacccttagaatactccaagatttctcctctgacccatcatcaaacttgacctctcatagcctcgagaagcttccacctgctgcagaagccgcagaaggagcaccccccggtcaggatcctggcgtgcgcagacctcctgacccagcccaccgtccactgcctagggatcccgggcctagggggccagtcctcccaccaggtctttcaggagatggtagccttttgactcgtctgtttcaacaccccctgtaccaagtaccaatacctccactgacagaaggggacgttctgtttaacgtcaacagtgatatacgttttaaccccaaagctgcaactgccgagaaccccgactggccacacgaaggccctgaggatgagttcctgccaactggtgaagctgcagtcgacagttatcctaactggctcaaattccatataggcatcaatcgttacgagctgtattccagacacaacccagctgtgggggctctcctgcaagacttgggtactcaaaagataacatccgtggccatgaaatccgggggtacccaactcaagctcattatgacattccaaaactacggtcaagcacttttcaaacccatgaagcaaactagagaacaagagactccaccagactttttttacttttctgattacgagcgccataatgctgaaatagccgcatttcacctcgatcgcatactcgatttccgcagggttccaccagtcgccggtagattggtaaatatgacaaaggaaattcgcgacgttactcgcgacaagaaactctggcgcactttttttatctccccagctaacaatgtgtgtttctatggggaatgtagctattactgttccaccgagcacgccttgtgtgggaaacccgatcagatcgaagggtctcttgctgccttcttgccagacctggcacttgccaagcgcaagacatggcgcaatccttggaggcgtagctatcataagcgtaaaaaagcagaatgggaggtagatcccgattactgtgaagaagtcaggcagacacctccttacgatagttctcatcgcctcctcgatgtgatggacatgaccatttttgacttccttatgggaaatatggaccgccaccattatgagacttttgagaaatttggaaacgaaacatttataattcatctggataacggtagaggttttggtaaacactcacacgacgagctctctattttggtaccactgcaacaatgctgccgtatccgtagatccacctatttgcgcttgcaactgctcgcccaggaagaacataggttgtcattgttgatggctgaagcactgcgcgctgatagagtagcaccagtattgtttcaaccccatttggaagcacttgatcgccgtcttagaatcgtactgagggcagtgggagactgcgtggaaaaggacggcctgcattctgttgtggaggacgacttgggtccagagcatagagccgctgctgggcgc

SEQ ID NO: 819 - DNA, 1758 bp, synthetic construct
  source 1..1758: mol_type = other DNA
atgaaaatgattcttgttagaaggtttcgtgtcctcattcttatggcctttctcgccgcctgtgcacttcacctcgtcctggatcttctgccaaaattggagaggtctgccgctcgtccttccggagaaccaggatgcagttgcgcccaacctgctgctgaagcagcagcccccggctgggctcaggctaggggtcaccctggaggggagcttgaagctgcagcatctgctgcaggtgacgccggatggcccaacaagcatacattgcgcattctgcaggacttctcctctgacccttcatccaatcttacttcacattctctcgagaagttgccaccagcagccgaagccgctgagggagctccccccgggcaagatcccggtgtacgccgcccacctgatcctgcacatagaccactccctcgcgaccctggtcccagggggcctgtgctgcctcctggactttccggcgatgggtctttgctgacccgcttgttccaacacccattgtatcaggtccccattccaccactcacagagggggacgttttgtttaacgtgaatagcgacatccgctttaaccctaaggctgccaccgcagagaacccagactggcctcatgaaggacccgaagatgagtttcttccaacaggtgaggcagcagtagactcctaccctaattggctcaaatttcatatagggataaatagatacgaactgtattctagacataacccagcagtaggtgccctcctccaagatcttgggactcaaaaaataacctcagtcgctatgaaatccggcggcacccagctgaagctcataatgacctttcaaaattacggtcaggcccttttcaagcctatgaaacaaactcgcgaacaagaaacaccccccgactttttctatttttctgactatgaaaggcacaacgcagagatcgctgcattccaccttgacaggattctggacttccgtcgcgttccacccgttgctggcagattggttaatatgaccaaggaaatacgcgatgttacaagagacaagaaattgtggcgtacttttttcataagtccagcaaacaatgtatgcttctacggagagtgttcttattattgcagcaccgagcatgccctctgtggtaagcccgaccaaattgaaggcagtctcgctgcattcttgccagacctggctttggctaaaaggaagacttggagaaatccctggcgcaggagctatcataagaggaaaaaagctgagtgggaagttgaccccgactattgtgaagaagtcaggcaaactcccccttatgactcctcacataggttgctggatgtgatggatatgactatttttgacttcctgatgggaaacatggaccgtcaccattatgaaacttttgagaaattcggtaacgaaactttcataattcatttggataatggaagaggttttggcaagcactcccacgacgaattgagtatcttggttcctctccaacagtgctgcaggatcaggcgtagcacatacctgagattgcagctcctcgcacaagaggagcaccgcttgagcctgttgatggcagaagctctgcgcgcagatcgtgtcgctcccgtactcttccaacctcacctcgaggcactcgatcgccgtcttaggattgtgcttagagccgtgggtgattgtgtggaaaaagatggccttcattctgtcgtcgaagatgacttgggccccgaacatcgtgcagcagcaggccgc

SEQ ID NO: 820 - DNA, 1758 bp, synthetic construct
  source 1..1758: mol_type = other DNA
atgaaaatgatccttgtgaggaggtttcgcgtcttgattttgatggctttcctggccgcctgcgccttgcacctggtgctggatctgttgcccaaattggaacgttctgcagcaaggccatccggcgaaccaggttgtagctgcgcccagccagctgccgaggccgccgctccaggctgggcacaagctcgcgggcatcctggaggggaactggaagcagcagcttcagccgctggtgacgcaggttggcctaataaacacacacttcgcatactgcaggacttctcttcagatccatccagcaacctgaccagtcattccttggagaaacttcctcctgccgccgaagctgctgagggtgcaccacctggacaagatcctggggtcagacgcccaccagaccccgctcataggccactccctagagaccctggcccacgtgggcccgtcctgccaccaggactgtcaggtgacggtagtcttctgaccaggctgttccagcatcctctgtaccaggtgcctattcctccactgacagagggtgatgttctttttaacgtaaacagcgacatccgtttcaacccaaaggcagcaacagctgaaaatcccgactggcctcacgaagggcccgaggacgaattccttcccacaggcgaagcagcagttgactcctatcctaattggctcaaattccatatcggtataaataggtatgaactttactcccgccataaccctgcagttggggcactcctgcaagacttgggaacccaaaaaataacctccgtcgccatgaaatctgggggaacccagttgaagctgataatgacttttcagaattacgggcaggctttgtttaaaccaatgaaacaaacccgtgagcaagaaaccccccctgattttttctatttcagcgattatgagagacataacgcagagatcgctgctttccacttggacagaatcctggatttccgtcgtgtacccccagttgctggacgtcttgttaacatgactaaggagattagggacgtaaccagagataagaagttgtggcgtactttttttatcagtcctgctaacaacgtatgcttttacggtgaatgttcttattactgttcaactgagcatgctctctgcggtaagccagaccaaatagaggggtccctcgcagctttccttccagatttggccttggctaaaagaaagacatggcgtaacccttggagaaggtcatatcacaaaagaaagaaggcagaatgggaagtagatccagattattgtgaggaagtcaggcagactcccccatatgacagttcccataggctgttggatgttatggacatgacaatattcgattttttgatgggaaacatggacagacaccactacgaaacttttgagaaatttgggaatgagacctttatcatacatcttgacaatggccgcggatttgggaaacactctcacgatgagttgtctatcttggtaccccttcaacagtgttgcagaatccgcaggtccacttacctccgcctccaactcctcgcccaagaggagcatcgcctctctcttttgatggcagaagcactgcgtgcagacagagtcgcacccgtcttgtttcaaccacatcttgaagcccttgatcgccgcttgaggatcgtactccgtgccgttggagactgcgttgagaaagacggtctccatagcgttgtagaggatgatctgggtccagaacacagggccgctgcagggagg

SEQ ID NO: 821 - DNA, 1758 bp, synthetic construct
  source 1..1758: mol_type = other DNA
atgaaaatgatattggttagacgtttccgcgttcttattctgatggctttcctggccgcttgtgcattgcacctcgttcttgacctgctgcccaagcttgagcgtagtgcagctcgtccctctggggagcctggatgttcatgtgcacagcccgccgctgaggctgcagcaccaggttgggctcaagcaagaggacaccccgggggtgagctcgaagctgccgcctccgccgctggcgatgccgggtggcctaataagcatactttgaggatcctgcaggatttcagctcagatccttcttccaaccttacatctcattcccttgagaaattgcctcctgcagccgaagccgcagaaggagccccacctgggcaggacccaggggttcgcaggccacctgatccagctcaccgtcctctcccacgcgatcccgggcctcgcggtccagtccttcccccaggattgagcggagatgggtctctgctcactcgcttgtttcagcaccccctctatcaagttccaatcccccctctcactgaaggagatgtgctcttcaacgtaaattctgacatacgtttcaatcccaaggccgcaacagccgaaaatcccgattggccccacgaaggcccagaggacgagttccttccaactggtgaagccgctgtagactcttaccccaattggctcaagtttcacattggtataaataggtatgagctttacagcaggcacaatcctgccgttggagctctgttgcaagacctcggtacacagaagattacatccgtcgctatgaaaagtggcggcacccaactgaaacttataatgacattccaaaattatggtcaagcactcttcaaaccaatgaagcagacccgcgaacaggaaactcctccagattttttttatttttctgattacgaacgccataacgcagagatagctgcttttcatctggataggatccttgattttaggagagtgccaccagttgcaggtcgcctggtaaacatgacaaaagaaattcgtgatgtcactagagacaagaaactttggaggactttctttatttcacccgccaacaatgtatgtttttacggagagtgttcatattattgctcaacagaacacgccctctgcggaaagcctgaccaaatagaaggtagcctggccgcctttctcccagacttggctctcgccaagaggaaaacctggcgcaatccttggcgcaggtcttaccacaaacgtaagaaggctgagtgggaggtagatccagattattgtgaggaagtccgtcaaacccccccatatgattcatcccacagactcctggacgtcatggatatgaccatatttgattttttgatgggcaacatggatcgtcatcattatgaaaccttcgagaagtttggtaatgagacattcatcatacacctcgacaatgggagggggttcggtaagcattcacatgatgagctctcaatactcgtcccactccagcagtgttgtcgcatccgtcgttccacttatctccgtctgcagctcctcgcccaggaagagcatcgtctctctcttctcatggcagaggctctccgtgctgaccgcgttgccccagtgcttttccagccccatctcgaagccctggacagacgccttagaatagtgcttcgcgctgtaggggattgtgtagaaaaggatggccttcacagtgtagtggaagatgacttggggcctgagcaccgcgcagccgcaggtagg

SEQ ID NO: 822 - DNA, 1758 bp, synthetic construct
  source 1..1758: mol_type = other DNA
atgaagatgatattggtaagaaggtttagggtactcatattgatggcatttctcgcagcctgtgcactgcacttggtcctggatcttctccccaaattggaaaggtctgctgctaggccctccggcgagcctggctgctcatgtgcccagcctgcagccgaggccgccgctcctggttgggctcaggctaggggtcatccaggcggggagcttgaagctgccgcatcagcagcaggagacgctggctggccaaataagcacacactccgtatactgcaggatttcagttcagatccctcctcaaacctcacttcccactcccttgaaaagcttccacctgccgcagaagcagccgaaggagctccccctggacaggatcctggggttcgtagacctcccgaccctgcccacaggcccctcccccgcgatcctggccctcgtggacccgtgttgccacctgggttgtccggtgatggatcactcctcactcgcttgttccagcacccactgtaccaggttccaattcctcccctgaccgagggcgatgtactctttaacgtaaactcagacatccgttttaaccccaaggccgctactgcagaaaatcccgactggccacatgagggccctgaagacgagtttctccccacaggtgaagccgccgttgatagttaccccaactggctcaaattccacataggaatcaacaggtatgagctgtattctagacataatcccgccgttggagctctcttgcaggatctcggaacccaaaagataacctctgttgccatgaaaagtggcggcactcaactcaagctcatcatgacttttcaaaactacggccaagcattgtttaaaccaatgaaacagacacgtgaacaagaaacccctcccgactttttttatttcagcgactatgaacgtcacaacgcagagatcgccgctttccacttggatcgcattcttgattttcgccgcgtgccaccagtagccggtcgcctcgtcaatatgacaaaggagatacgcgatgtcactcgtgataagaagctctggcgcactttcttcatttcaccagccaataacgtatgtttttatggagagtgctcatactattgttctacagaacatgccttgtgtggtaaacctgatcagatcgagggatctctggcagccttcctccctgatctggccttggcaaaacgtaagacctggaggaatccctggcgtcgttcctaccataaaaggaagaaagctgaatgggaagtagatcctgactattgtgaggaagttaggcaaacccctccatacgacagttcccacagattgttggatgtaatggatatgaccatatttgacttccttatggggaatatggacaggcaccattatgagacttttgagaagttcgggaacgagacattcattatacaccttgataacgggagggggtttggcaaacatagccatgacgagctgtctattctggtacccctccagcagtgttgtagaatacgcaggtctacttaccttaggctgcagctcttggctcaagaagagcatcgtctttctttgttgatggccgaagccttgcgcgccgatagggtagcccctgttctctttcagccacatcttgaagcattggatcgccgtctgcgcatagtcttgagagccgtaggcgattgcgtcgaaaaggatggcctgcatagcgtcgttgaagatgacttgggacccgaacaccgtgcagctgcaggaagg

SEQ ID NO: 823 - DNA, 1758 bp, synthetic construct
  source 1..1758: mol_type = other DNA
atgaaaatgattctcgtccgcaggtttagagtcctgattctgatggccttccttgccgcatgtgccttgcacttggtactggaccttctgcccaaactcgagcgtagcgccgcacgtccctcaggtgaaccaggttgcagttgcgcacaaccagccgcagaggctgctgctcccgggtgggcccaagcaaggggacaccctggtggagaactggaagcagccgcttctgctgccggtgacgctgggtggcccaataagcacactctgaggatccttcaggacttctcaagcgatcctagttccaatctgacttctcattctttggaaaaacttccaccagcagcagaggccgcagaaggagctcctccaggccaggacccaggcgtacgcagacctcccgaccctgcccatagacccctgcccagagaccccggtcctcgtggacctgttttgccacccggactctcaggggatggttctctgttgacaaggctgttccagcaccctctctaccaggtccctattcccccattgactgagggtgatgtcctgttcaatgttaactctgacattagattcaaccctaaagccgcaactgcagaaaatcctgattggccacatgagggacccgaggatgagttcctgccaaccggcgaggcagccgttgactcatacccaaattggttgaagttccatatcggcatcaataggtatgaattgtattccaggcataatcccgcagttggggccctccttcaggacctgggaacacagaaaataacttctgtggcaatgaaaagcggaggtacacagctgaagttgattatgacctttcaaaactatggacaagcactgttcaagcccatgaagcagaccagagaacaggaaactccccctgacttcttttactttagtgactatgaacgtcacaatgctgagatagccgcttttcacctggataggattcttgatttcagacgtgtcccacccgttgccggacgtcttgtcaatatgaccaaagagataagggatgtcaccagagataaaaaactttggagaacttttttcatctcccctgcaaataatgtttgcttttacggggaatgctcatactattgcagcacagagcacgccttgtgtggaaagcctgaccagatcgagggatcactcgctgccttcttgccagatctcgccctggctaaaagaaaaacttggcgcaacccttggcgtcgcagttatcataagcgcaagaaggccgagtgggaggtagatcctgattactgcgaagaagtaagacagacaccaccctacgacagcagccatcgtctcctcgacgtcatggacatgacaatttttgactttcttatgggtaacatggacaggcatcactatgagaccttcgagaaattcggtaatgaaactttcattattcatttggataatggacgtgggtttggcaagcactctcacgacgaactctctatcctggttccactgcagcagtgctgcaggattcgccgcagtacttatttgagacttcagttgttggcacaggaagaacacaggctcagcctgcttatggctgaggcccttcgcgctgaccgtgtggctccagtgttgttccaaccacatcttgaagctctggaccgccgtcttaggatcgtgttgagggccgtgggagattgcgttgaaaaggacgggctccatagcgtggtagaagacgaccttgggccagagcacagagccgcagccggacgc

SEQ ID NO: 824 - DNA, 1758 bp, synthetic construct
  source 1..1758: mol_type = other DNA
atgaaaatgatactcgtacgtaggtttcgtgtattgatacttatggccttccttgcagcttgcgctctccatctcgttttggatttgctccctaaattggaacgttccgcagctaggcccagtggagagcctggttgctcttgtgcccaacctgctgcagaggcagcagctccaggatgggcacaagctcgcggccatcccggcggtgaacttgaagccgccgcaagtgctgcaggcgacgctggatggcctaataagcatacactgagaattttgcaagacttttcctctgatccatctagtaacctgacttctcactctctggaaaaacttccacccgctgcagaagccgctgaaggcgctcctcccggacaagacccaggggtgagacgtcctcctgatcctgcacatagacccctccccagggatcctgggccacgtgggccagttctccctcccgggctttccggggacggatctttgttgacaagactttttcagcaccctctgtaccaggttcccataccccctctcactgagggtgacgtgcttttcaacgtgaattcagacatccgctttaaccctaaagccgccactgccgaaaatcccgactggcctcatgaaggacctgaggatgaattcctgcccaccggagaggcagccgtggattcctatcctaactggttgaagttccatatcggtatcaatcgttacgagttgtattcacgccacaatccagcagtgggggctctcctccaagaccttggcacccaaaagattacaagcgtcgctatgaagagtggaggaacacaacttaagttgattatgacatttcaaaattacggacaagctttgtttaaacccatgaaacagactcgtgagcaggagacacccccagacttcttttatttttctgactatgagcgtcacaacgcagaaattgcagcattccatctcgatcgtatcctcgatttccgcagggtgcctccagtagccggccgtttggtgaacatgactaaagagataagggacgttactagagacaaaaaactttggaggactttttttatctcaccagctaataatgtctgtttctatggggaatgcagctactactgtagtaccgagcatgccctttgcgggaaacccgaccaaatagaaggctccttggccgcatttcttccagacttggctcttgccaagcgtaaaacatggaggaacccatggcgtcgcagttatcacaagcgtaagaaagctgagtgggaagttgatcccgattactgtgaagaagtgagacagactccaccttacgatagcagccaccgccttctggatgttatggatatgaccatttttgattttcttatgggcaatatggaccgccatcattatgaaaccttcgagaagtttgggaacgagacttttataattcatcttgacaacggacgtggcttcgggaaacattcacacgacgaactctctatattggtccccctccagcaatgctgtcgtataaggaggagcacttatctgaggttgcagctgctcgcccaggaagaacacaggctcagtctcctcatggccgaagcattgagggcagatcgtgttgctcccgtcctctttcagcctcatctcgaagccctggataggcgtctgcgtattgtactccgcgctgttggagactgcgtagagaaagatggccttcatagtgtcgtagaagacgacctgggtccagaacatcgcgcagcagccgggagg

SEQ ID NO: 825 - DNA, 1758 bp, synthetic construct
  source 1..1758: mol_type = other DNA
atgaaaatgatattggtacgtaggttccgcgtccttatacttatggcatttctggctgcatgcgctctccacctcgtgctcgatctccttcccaagttggagaggtccgcagcacgtccctccggcgagcctgggtgctcatgcgctcaaccagctgcagaagccgcagctcccggatgggctcaggcccgtggacatccagggggggaactggaggctgcagcttcagcagcaggagacgctggatggccaaacaaacacactctgcgtattctgcaagacttcagcagcgatccttcctcaaatctgacctcacacagcttggaaaaacttcccccagctgctgaagcagctgagggtgccccacccggacaagatccaggcgtaagaaggcctccagacccagcccataggcctttgcccagagaccctggcccaagaggaccagtcttgccaccaggcctcagtggtgacggctctctgttgacacgcttgttccaacacccattgtaccaagtaccaatcccaccactgacagagggggatgttcttttcaacgtaaacagcgacattcgtttcaatcctaaggccgccaccgccgaaaatccagattggcctcacgaggggcctgaagacgaattccttccaactggtgaagcagctgtcgatagttatcctaattggcttaagttccacatagggatcaaccgctatgaattgtattctcgccacaaccccgctgtaggagccttgttgcaggatctcggtactcagaaaatcaccagcgtcgccatgaaaagtggtggaacacagctgaaactcattatgacctttcaaaattacggtcaggcactgttcaaaccaatgaagcaaactagagagcaggaaacacccccagacttcttctacttctcagattatgaaagacacaacgccgagatcgcagcatttcatcttgaccgcatcttggattttagacgcgttcctcctgtggccgggagattggttaacatgactaaggaaataagagatgtgacacgcgacaagaaactgtggcgcacattcttcatctccccagctaacaatgtatgtttttacggggaatgttcctactactgcagtaccgaacatgccctctgtggtaagcccgatcaaattgagggttcactggcagcttttcttcccgacctggctcttgcaaaaaggaagacctggagaaatccttggcgtaggagttaccataaaagaaaaaaagccgaatgggaggttgatcctgactattgcgaggaagtgagacagactcccccctacgactcttctcaccgtctcctcgacgtaatggatatgacaatttttgattttctcatgggtaatatggatagacaccattacgaaacatttgagaagttcggtaacgagacctttatcatacacctcgataatggaaggggttttggaaaacattcccacgatgagttgagtattcttgttcccttgcaacagtgctgccgtattaggcgtagtacctatcttcgcttgcaactgctggctcaagaggaacaccgtttgtccttgctcatggccgaggctttgagagctgaccgtgtagctcccgttctgttccaaccacatctggaggctctggacagaagactgagaattgtccttagggcagtgggcgactgcgtagagaaggacggcctgcactctgtagttgaagacgatttgggacctgagcacagagcagctgcagggagg

SEQ ID NO: 826 - DNA, 1758 bp, synthetic construct
  source 1..1758: mol_type = other DNA
atgaaaatgatcttggtacgtcgtttcagggtcctgattctcatggcctttctggccgcttgtgcccttcatcttgttctggatctccttcccaagttggagaggtccgcagcacgcccttccggcgaacccggttgttcttgtgcccagcctgcagctgaggctgccgcaccaggttgggcccaagcccgtggtcatccaggtggagagcttgaagccgcagcaagtgcagcaggggacgccgggtggcccaataagcatacactcaggatacttcaagacttttcaagcgacccatctagtaacctgacttcccacagtctcgaaaaattgcctccagcagctgaagcagccgaaggggctcctcccgggcaggatcctggagtgaggcgcccccccgaccctgctcacaggccactcccacgtgatcccggaccccgtggcccagttctcccccctggtctgagtggagatggctccttgctcactcgcctgttccaacacccactttatcaagtgcccattccacctctcaccgagggtgacgtccttttcaacgtgaattctgatattcgtttcaaccctaaggcagctactgcagagaatcctgattggccacatgaaggacctgaggatgaattccttcccaccggagaagccgctgtcgattcttacccaaactggctcaagtttcacatcggaattaataggtatgaattgtattctaggcacaaccccgctgtaggggcacttttgcaagatttggggacccaaaaaattaccagcgtcgctatgaaaagtggtggcacccaactcaaactgatcatgacattccaaaactatggccaggctctgttcaaacctatgaagcaaactcgcgaacaagagacacctcccgattttttctatttctcagactatgaacgccataatgctgaaatcgccgcttttcatcttgaccgcatcttggacttcagacgtgtaccacccgtcgctggcagactcgtgaacatgaccaaggagatcagggacgtcactagagataagaagttgtggagaacctttttcatatcccctgctaataacgtctgcttctatggcgagtgcagttactattgtagtacagaacatgcactgtgtgggaagcccgatcagatcgaaggcagccttgcagccttcctgcctgacctggcacttgcaaaaaggaagacatggcgcaatccatggcgtaggtcttaccacaagcgtaaaaaggctgagtgggaagtagaccccgactactgcgaggaggtgcgccaaacacccccatatgatagcagtcatcgtcttcttgacgtcatggacatgacaatatttgattttttgatgggtaatatggacagacaccactatgaaaccttcgaaaagttcggtaacgagacattcatcattcacttggataacggaagagggttcggaaaacattctcatgatgagctctcaatcttggtacccctgcagcagtgctgtcgcattaggcgctccacatacctccgtcttcaacttcttgcccaggaagaacacaggctttcattgctgatggctgaagcactcagagccgatagggtcgcccctgtcttgtttcaaccccatctcgaggcactcgataggaggctgcgtatagtactccgcgctgtgggtgattgcgtggagaaggacgggctccactcagtggtagaagatgatctcggtcccgagcacagggcagccgccggacgt

SEQ ID NO: 827 - DNA, 1758 bp, synthetic construct
  source 1..1758: mol_type = other DNA
atgaagatgattctcgttaggcgttttagagtccttattttgatggcatttctggccgcctgtgccctccatctcgtactcgaccttctgcccaagctcgaacgctctgctgctcgcccttccggcgagcctggctgctcctgtgctcagcctgcagctgaagctgcagcacccggctgggcacaggcaaggggtcatccaggcggtgaattggaagctgccgcatccgccgcaggtgatgcaggttggcctaacaagcatacacttcgtatcttgcaggatttcagtagcgacccctcctctaacctgacttcccattccttggagaaactccctccagcagctgaagcagcagagggagcccctccagggcaggacccaggagttcgccgtcctccagaccccgcacacaggccattgccacgcgacccagggcctagaggacccgtgctgccaccaggcctctctggtgacggtagtctgctcactagactttttcagcatccactgtaccaagtaccaatccccccactgactgagggggatgttctcttcaatgtcaattcagacattcgttttaacccaaaggccgcaacagcagagaaccccgactggccacacgaagggccagaggatgagttcctgcccactggcgaagctgccgtggatagttaccctaattggcttaaatttcatatcggcataaataggtatgagctttatagtagacacaatcccgcagtgggagccctgcttcaagatctcggaacacaaaagataacttctgtagcaatgaaaagcggtggcacacaactgaaacttataatgacttttcaaaattacgggcaggcactctttaagcctatgaaacagacaagagaacaggaaacccccccagacttcttttacttctcagactatgagaggcataacgctgagattgctgcttttcatctcgatcgtatccttgacttccgccgcgtccctccagtggcaggacgtcttgtgaatatgactaaagagattcgtgacgtaacacgtgacaaaaaactgtggagaactttttttattagtcctgcaaacaacgtatgcttctatggagagtgcagctactactgtagcactgaacacgctctttgtggaaaaccagaccagatagaggggtccctggctgcattcctccccgatttggcccttgcaaaacgcaagacttggagaaatccttggcgtaggagctaccataagagaaagaaggccgagtgggaagtggaccccgattactgcgaagaagttcgccaaacaccaccatacgacagcagtcacaggctgctggacgtgatggacatgaccatttttgactttctcatgggtaatatggatagacaccattacgaaacattcgagaagttcggtaatgaaacttttatcatccacttggataatggaagaggtttcggaaagcatagccatgacgagcttagtatcctggtgcctttgcaacagtgttgtaggatccgtcgcagtacttatctgcgcctccagcttcttgcacaggaagaacataggctgtcactgttgatggccgaggctcttagggctgatcgtgttgccccagtactttttcaacctcacttggaagctcttgaccgtaggctccgcattgttcttagagctgtgggagattgtgttgagaaggacgggctccattctgttgtagaggatgacctgggtccagagcacagggctgctgctgggcgt

SEQ ID NO: 828 - DNA, 1758 bp, synthetic construct
  source 1..1758: mol_type = other DNA
atgaaaatgattctcgttaggagattcagagtgcttatattgatggccttcctcgccgcatgtgccttgcaccttgtgctggatctgcttccaaaactcgaacgttcagctgcacgcccctcaggcgaacccggatgctcttgcgcccagcctgctgccgaagccgcagctcccggatgggctcaagcaaggggtcacccaggtggggaactggaagccgctgctagtgcagcaggcgatgctgggtggcccaataagcacactctgagaattcttcaagacttttcttcagacccatcatctaacctgacatctcactccctcgaaaagctgccaccagccgctgaagccgcagaaggagcaccaccagggcaagaccccggagtcagaaggccacctgatccagcacaccgtccccttcccagggaccccggaccacgcggcccagtgttgcccccaggtctctccggagatggttcccttttgactagactctttcaacatcctttgtatcaagtccctattcctccactgacagagggggatgtcttgttcaatgttaactccgacatccgctttaatcctaaggctgccactgccgaaaacccagattggcctcatgaaggaccagaagatgagttcctccccaccggggaagctgctgtggactcctacccaaattggcttaaatttcacatagggatcaatcgctatgaactgtatagtcgccataaccctgctgtcggggctctcttgcaagacctcgggacccagaagatcacttctgtggcaatgaagtccggcggtacacaattgaaactcataatgacattccagaactatggtcaagcccttttcaaacccatgaaacaaactagggagcaggaaactccacccgacttcttctatttttctgattacgagagacacaatgctgaaatcgctgcattccatcttgatcgtatattggactttagaagagtaccccccgtggctgggagacttgtcaatatgaccaaagaaattcgcgatgtgacccgcgacaagaagctctggagaacatttttcatttcccctgccaataacgtctgtttttatggtgagtgttcctattattgttccactgagcatgctttgtgtggaaagccagaccagatcgagggttctttggcagccttccttccagacttggcactggctaagagaaaaacctggaggaatccctggcgtcgctcttatcataaacgcaagaaggcagagtgggaagtagaccccgactattgtgaggaggttcgtcaaactcccccttacgacagtagtcatagattgctcgacgtcatggacatgaccatctttgatttcctgatgggaaacatggatcgccatcactatgaaactttcgaaaagttcggaaacgaaaccttcattatacatttggataatggcagaggatttgggaaacattctcatgacgaactctccatacttgttcccttgcaacagtgttgccgtatccgcagatcaacttacctccgccttcaacttcttgcccaggaagaacaccgtctgagcctcctgatggccgaggcccttcgcgccgaccgcgtagctcccgtgctcttccaacctcatctcgaagctcttgatcgtagacttcgtatagtactgagggccgtaggggactgtgtggaaaaagacgggcttcactcagttgttgaggacgacttgggcccagaacaccgtgcagctgcaggccgc

SEQ ID NO: 829 - DNA, 1758 bp, synthetic construct
  source 1..1758: mol_type = other DNA
atgaaaatgattttggtcagacgcttcagagttcttattttgatggccttcctggctgcatgcgccctccacctggtcttggatctgctgcctaaactggaacgctctgccgcaaggccttcaggagaacctggatgctcctgtgcacagccagctgctgaagctgctgctcccggttgggctcaggctagagggcaccctggaggtgaactggaggcagctgctagtgccgcaggcgatgctggatggcccaataaacataccctgcgcatactgcaagacttctcctctgatccttcctccaatcttactagccacagccttgagaagttgccccctgctgccgaagcagctgagggagctccaccaggtcaggatccaggcgttcgccgtccacctgatcccgcccatagacctctccctagagaccctggcccccgtggacccgtactgcctccaggattgagcggggacggcagcttgcttaccagactgttccagcatcctctttaccaagtacctattcctccacttaccgagggtgatgtacttttcaacgttaatagcgacataaggttcaatcctaaagctgccacagccgaaaaccccgactggccacatgaaggacctgaagacgagtttctccccactggcgaagctgcagtcgattcatatccaaactggctcaagttccacatcgggattaaccgttacgaactttacagtcgccacaatcccgccgtgggcgcactcctccaggatttggggacacagaaaatcacctcagtcgctatgaaatctggggggacccaattgaaactgatcatgacattccagaattacggtcaagctctctttaagcctatgaagcaaactagggaacaagaaactccccctgacttcttctacttctccgattacgagcgccacaatgccgagattgccgcatttcacctcgatcgtatattggatttccgcagagttccacctgtcgccggccgcctggtaaacatgaccaaggaaattagagacgttactagggataaaaaactttggaggacatttttcatttctcctgcaaacaacgtttgcttctacggtgagtgtagctactactgctctactgaacacgcattgtgcggcaagccagaccagattgaagggagtcttgccgcatttttgccagatcttgcactggcaaaacgtaaaacatggaggaacccttggcgcagaagttaccacaaacgcaagaaggccgagtgggaagtagatcctgattactgtgaggaggttaggcagacccccccctatgatagctcccataggctcctggatgttatggacatgacaattttcgattttctcatggggaatatggaccgccatcattacgagacattcgagaaattcggcaatgaaacatttatcatacatttggataatggccgcggtttcggtaagcattcacatgatgaactctccatacttgttcctcttcaacaatgctgtcgtataagaaggagcacttacctccgtctgcaacttcttgcacaggaggaacaccgtctctcactgctcatggccgaggctttgcgtgccgatagagtcgcccctgtcttgttccaaccacatctggaagctttggatcgtaggcttagaatagtactcagggccgtcggagactgtgttgagaaggacggcctgcattccgtggtggaagacgatttgggaccagaacatagggctgcagctgggaga

SEQ ID NO: 830 - DNA, 1758 bp, synthetic construct
  source 1..1758: mol_type = other DNA
atgaaaatgatccttgtccgccgtttccgcgtactcatcctcatggctttcttggccgcctgtgcattgcatcttgtacttgacctcttgcctaaattggagcgctccgctgctagaccatccggagaaccaggctgttcatgcgcacagcccgcagccgaggctgccgcacctggttgggcacaagccaggggccatcctgggggggagcttgaagctgcagcaagcgctgccggtgacgcaggatggcctaacaaacacaccttgcgcattctgcaggatttttcttcagatccctcatctaatcttacctcacattccctcgaaaagctgccaccagcagcagaagctgcagagggagcaccaccagggcaggatcccggagttagacgtccccccgatcccgctcataggccccttcctagagatcccggaccaaggggaccagttctgcccccagggctgtccggggatggatctctcttgacaagactcttccagcaccccttgtatcaggtaccaatacctcctctcaccgaaggagacgtcctgtttaacgtgaattcagatatccgctttaaccccaaagccgcaactgctgagaaccctgactggcctcacgaagggccagaagatgaatttctgcccaccggcgaggccgcagtcgatagttatcctaactggctgaagttccacatcggcattaatcgttacgagctttactccagacacaaccctgcagtgggggcccttcttcaggacctcggtacacaaaaaattacatctgttgccatgaaaagtggcggcacccaacttaaactgataatgactttccagaactatggtcaagctctttttaagcccatgaagcagactcgcgagcaagagactccaccagatttcttttacttttcagattacgagcgtcataacgccgagatagccgcatttcatctcgaccgtatattggacttcaggagagtaccacctgtagccgggcgcttggtgaacatgacaaaggagattagagacgttaccagggataagaaactgtggcgcacttttttcatcagccctgctaataacgtgtgcttctatggagagtgctcatactattgctccaccgaacacgccctctgtgggaaacccgatcaaatagaagggtccctcgcagccttcctccctgatctggcacttgccaaacgtaaaacctggcgtaatccttggcgcagaagctatcacaagagaaaaaaagcagagtgggaagtggatcccgactattgcgaggaagtgagacagaccccaccttatgactctagtcatcgcttgttggatgtaatggacatgaccatttttgattttctgatgggtaacatggacaggcatcactacgaaacttttgagaaattcgggaacgagacctttattatccacctcgacaatggccgtggctttggtaaacatagtcacgatgagctgtccattcttgtgccactgcaacagtgttgtcgtattaggagatcaacttacctgaggctgcaattgctggcccaagaggaacatcgcctgagcctgcttatggctgaagctctgagagccgatagggttgctcccgtcctgtttcagcctcacctcgaggccctggatcgtagacttagaatagttctgagggcagtaggggattgcgtagaaaaagacggtttgcactcagtggttgaagacgacttgggccccgaacatagggctgctgccgggcgt

SEQ ID NO: 831 - DNA, 1758 bp, synthetic construct
  source 1..1758: mol_type = other DNA
atgaaaatgatcctcgtgcgccgttttcgtgtattgattttgatggcattccttgctgcctgtgccctccacctcgtgcttgaccttctcccaaagctggagagatcagctgctagaccttcaggcgagccaggctgcagctgtgcacagcccgcagccgaggcagccgccccaggctgggcacaagcaaggggacatccaggtggtgaacttgaggccgctgcaagtgctgctggagacgcaggctggcctaacaagcacacattgaggatcctccaagacttcagcagcgatccatcttccaatcttacttcccactccctggaaaaattgcccccagccgccgaggcagcagagggagccccccctgggcaagacccaggggtgaggcgccctccagacccagctcatcgtcccctgccacgtgatccagggccaagaggtcctgtattgccaccaggactttccggtgatggaagcttgttgacacgtctgtttcaacacccactctatcaggtccccatccctcccctcactgagggcgatgtcctcttcaatgtaaatagcgacataagattcaacccaaaggcagcaacagcagaaaaccctgactggccccatgagggccccgaggacgaattccttcctaccggcgaggccgcagtcgactcctaccctaattggttgaagttccatataggtattaatagatatgaattgtattcacgccacaatcctgctgttggggctttgctccaggaccttggcacccagaagattacatccgttgctatgaagagcggcggtactcaactcaagttgatcatgaccttccaaaactatggacaggctctttttaagcccatgaagcaaacacgcgaacaggagactccccccgactttttctacttctctgactatgaaaggcataacgctgaaatcgccgcattccaccttgaccgcatattggactttcgtcgtgttccccccgtagccgggcgtctcgtcaatatgactaaggagattcgtgatgtcaccagagacaagaagctgtggcgtaccttctttattagcccagctaacaatgtctgtttttacggtgagtgctcatattactgcagcactgagcatgctttgtgtggcaagcccgatcaaatcgaagggagtttggcagcattcctgcctgacctcgcactggcaaaaaggaaaacttggaggaacccctggagacgcagctaccataaacgcaagaaggctgagtgggaggttgatcccgactactgcgaggaagttcgccaaacaccaccttatgactcaagtcacaggctgctcgatgtcatggatatgacaattttcgatttcctgatgggtaatatggacaggcatcattacgagacctttgaaaaattcggtaacgagacatttatcatacatctggataacgggcgtggatttggcaaacatagtcacgacgaacttagtatcctcgtacctctgcaacaatgctgtcgtattagacgttccacctatcttcgcttgcaactcctcgcacaagaagaacatcgcctttcactcttgatggctgaagcattgagggccgaccgcgttgcacccgttctgtttcaaccacatttggaggccctcgatcgcagactccgcatcgtgcttcgtgctgtaggcgattgtgtggaaaaagacggactgcactccgttgtcgaagatgatctgggtcccgagcaccgtgcagctgctggccgc

SEQ ID NO: 832 - DNA, 1758 bp, synthetic construct
  source 1..1758: mol_type = other DNA
atgaaaatgatattggtcaggaggtttagggtcctcattctcatggcatttcttgccgcatgcgctttgcaccttgtccttgatttgctccctaagttggagagatccgcagctagaccttcaggtgagcctggctgcagctgtgcacaacccgcagcagaggctgctgctcccgggtgggcacaagcccgtggacaccctggaggcgaactggaagctgccgcttccgcagctggagatgccgggtggcccaacaaacacacactccgtatcctgcaagattttagctccgacccttcttcaaacctcactagtcactccctcgaaaaactgcctcccgcagccgaggccgccgaaggcgccccaccagggcaggaccccggcgtgagaagaccacctgatcctgctcatagacctctgcctagagatcctgggcctagagggcccgtccttccacccggtcttagtggagacggtagtcttctgactaggttgtttcaacacccattgtatcaggtccctatccccccattgactgagggggacgtactctttaacgtcaacagcgatattcgtttcaatcccaaggccgccacagccgaaaatccagattggccacacgagggacctgaagacgagttcctgcctaccggcgaagccgcagtcgactcttatcccaactggttgaagtttcatataggtatcaatagatacgaactctacagtcgtcacaaccccgctgttggcgcactccttcaggaccttggtacacaaaagatcacatccgtcgccatgaaaagtggaggaacacaacttaagctcataatgacttttcaaaattacgggcaggccttgtttaaacccatgaagcagacccgtgagcaggaaactccacccgattttttttacttctcagattacgaacgccataatgcagaaatagctgccttccacttggatagaatactggacttcaggagggtgcccccagtcgcaggtcgcttggtgaacatgacaaaggaaatacgcgatgtaactagggacaaaaagttgtggagaaccttttttattagccctgctaacaatgtttgtttctacggtgaatgttcctactattgttccaccgaacacgccctttgtgggaaaccagaccaaatagaaggcagccttgctgcctttttgcctgacttggcattggccaaacgcaaaacttggaggaatccatggcgtcgttcataccacaagaggaaaaaggcagagtgggaggtcgatcctgactactgcgaagaagtaagacaaacaccaccttacgatagtagtcaccgcctgcttgacgtaatggacatgaccatattcgatttcctcatgggaaatatggatcgtcaccattacgagacatttgaaaagtttggcaacgagacctttatcatacacctcgataacggacgtggctttgggaagcatagccatgacgaactttccattcttgtccctcttcaacagtgttgtagaattaggagatccacctacttgcgtctgcagctcttggcccaggaggagcatcgtttgtctttgttgatggcagaagctctgcgcgcagatagggtcgcccccgtcctcttccagccccacctggaagcattggaccgcagactgaggattgtattgcgtgctgtcggggattgcgtagagaaggacggattgcatagcgtcgttgaagacgatctcgggccagaacatcgcgccgcagccgggaga

SEQ ID NO: 833 - DNA, 1758 bp, synthetic construct
  source 1..1758: mol_type = other DNA
atgaagatgatcctggttcgcagatttcgcgtattgattttgatggcctttctcgctgcctgtgcacttcacttggttctcgaccttctccctaaactggagagatctgcagctcgcccaagcggggaacccgggtgttcatgtgcacagcctgctgctgaggcagcagcacctggatgggcacaagcccgtggtcatccaggcggtgagttggaagccgccgcttcagccgctggagatgccggatggcctaacaagcatactcttcgtatactccaagatttctcctctgacccatccagcaaccttactagtcactcacttgagaagttgcctcctgccgccgaagcagccgaaggagccccacctggccaggaccctggtgtacgtagacctcccgatcctgctcatcgcccactgcccagagatcctggaccccgtggtccagtcctgccacccggtctctccggtgatggttctctgctgacaagactgtttcaacaccccctgtatcaggtgcctattccacctcttacagaaggagacgttcttttcaacgtgaacagtgacatccgtttcaatcctaaggccgccactgccgagaatccagactggccacatgagggacctgaagatgaatttctgcctaccggagaagctgccgtcgactcttatcccaattggcttaagttccatattggtatcaatagatatgagttgtacagcaggcacaatccagcagttggcgcccttctccaggaccttgggactcaaaagataacatcagtggctatgaaatctggcgggacccagttgaagcttatcatgacttttcagaactatgggcaagctctgttcaaacctatgaaacagaccagagaacaggaaacaccacctgattttttctatttctctgactacgaacgtcataacgctgagatcgcagcattccaccttgatagaatacttgattttagaagagttcctcccgtggcagggaggctcgttaatatgactaaggaaatccgtgatgtcacaagagacaaaaagctctggagaaccttttttatatctcccgctaacaatgtttgcttctatggtgaatgttcctattattgctctaccgagcatgccctctgtgggaaaccagatcaaatcgaagggtcacttgctgcattccttccagacttggctttggcaaagcgcaaaacttggagaaacccttggaggaggagctatcataagcgcaagaaagctgaatgggaagtagaccctgactattgcgaggaggtgagacaaacacctccctacgattcttcacacaggcttctggacgtgatggacatgacaatatttgactttctcatgggaaacatggatcgtcatcattacgagacttttgagaaatttggaaatgagacctttatcatccaccttgacaatgggagaggatttggaaagcatagtcatgacgaactttccatcctggtacctcttcagcagtgttgcaggatccgcaggtctacctatttgagactccaactgctggcccaagaggagcataggctttccctcctgatggcagaagcactcagggccgaccgcgttgctcccgtccttttccaacctcaccttgaggcactcgaccgccgcttgagaattgtcctcagagctgtcggcgactgtgtagaaaaagacggacttcatagtgtcgttgaggacgatctggggccagaacatagagctgccgcagggaga

SEQ ID NO: 834 - DNA, 1758 bp, synthetic construct
  source 1..1758: mol_type = other DNA
atgaaaatgatattggtaaggagattcagagttttgattctgatggccttcctcgcagcttgtgctctgcatcttgtattggatcttcttccaaaactggagcgttccgcagctagacctagtggggagccaggatgtagctgcgcacagcccgcagcagaggccgccgctcctggctgggcacaggccaggggccatcctggaggtgaactcgaggcagcagcatcagcagctggagacgctggttggcctaataagcatactcttcgtatcttgcaggacttcagttctgatcccagcagtaacctcacttcacatagccttgaaaaattgccccccgccgctgaagctgcagaaggcgcccctcctggccaggatcctggcgtacgcagacctcctgatcctgcacaccgtcccctgcctagggacccaggtccaaggggcccagtgctcccacctggtctgagtggcgacggtagcttgcttactaggttgtttcagcatccactgtatcaagtacctatcccacctttgactgaaggagatgtgctctttaacgttaactccgacatacgctttaacccaaaagcagcaactgctgagaaccctgactggcctcacgaggggccagaggatgagtttctgcctaccggcgaagccgccgttgattcttatcctaattggctcaagtttcacattgggatcaataggtacgaactttattctcgtcacaacccagctgttggagcacttctgcaagatttgggcacccagaagataaccagcgttgcaatgaaatctgggggtacccagcttaagctgataatgacatttcaaaactacggtcaggctttgtttaagcccatgaagcaaactagggaacaggaaacccctccagattttttttactttagtgactacgaacgccacaatgcagagatcgccgcatttcaccttgataggattcttgattttaggcgtgtcccaccagtagctgggcgcttggtgaacatgacaaaagagattcgcgacgtaaccagggataagaagctgtggagaactttctttatttctcccgctaataacgtatgtttctatggcgagtgctcctactactgtagtacagaacatgctttgtgcggaaaacctgatcagattgaagggtcattggctgcattccttcctgaccttgccttggccaagcgtaagacttggagaaatccatggaggcgtagctaccataagcgtaaaaaagcagagtgggaggtcgaccctgattattgtgaagaggtgcgtcaaacacccccatatgatagcagtcaccgtttgctggacgtgatggatatgaccatttttgatttcctgatggggaatatggatcgccatcattacgagactttcgaaaagttcggaaatgagacctttatcatccacctggacaatggcaggggcttcggaaagcatagtcacgacgagttgtccatattggtgccccttcaacaatgctgtagaatccgtcgttccacatatttgagactccagcttcttgcccaggaggagcacaggttgagtcttcttatggctgaagcccttcgcgccgaccgtgtggcacctgttctttttcagccccatcttgaagcattggatcgtcgtctgagaattgtcctgagggcagtaggtgactgtgtggagaaggacggtcttcatagcgtcgtcgaggatgatctgggccctgagcaccgtgcagccgcaggaagg

SEQ ID NO: 835 - DNA, 1758 bp, synthetic construct
  source 1..1758: mol_type = other DNA
atgaaaatgatactcgtccgcaggtttcgtgtgttgatccttatggcttttctcgctgcctgtgccctccacttggtattggacctgttgcctaagttggaacgtagtgcagcaaggccttccggtgagccaggttgttcatgtgctcagcccgctgccgaagcagccgctccaggctgggctcaggcaagaggccatcccggtggtgaactggaggcagccgcatctgctgctggtgatgcagggtggcctaacaagcataccctccgcatcctgcaagatttttccagcgaccccagctcaaacctgaccagccatagtcttgaaaagctcccccctgcagcagaagctgctgagggtgctccccccggccaagatcccggggtaagaaggccaccagatccagcacaccgccctttgccaagagacccaggacccaggggccctgtcttgccacccggtctgtcaggtgatggcagcttgctgacacgcctgtttcaacaccccctgtatcaagtacctattccccctcttacagagggcgatgtccttttcaacgtgaattccgatattaggtttaatcctaaagccgccacagccgaaaacccagattggcctcacgagggtcccgaagatgaattcttgcctactggagaagctgccgtggatagttaccccaactggctgaagtttcatatcggcattaaccgttatgagttgtatagtcgtcacaaccctgcagtgggggctctcctccaggacctgggaactcagaaaattacatctgtagctatgaagtccggtgggacacagctcaagctgataatgaccttccagaattacggacaggccctgttcaagcctatgaaacagacacgtgagcaggaaaccccacctgacttcttttacttttccgactatgagcgtcacaatgccgaaattgcagcttttcaccttgaccgcatcctcgacttcagacgcgtccctcccgtggctggtagactggtcaacatgacaaaagaaatacgtgatgtcaccagggataagaaactctggaggactttctttatcagcccagcaaacaacgtctgcttttatggtgaatgttcttactattgttcaacagaacacgcattgtgtgggaaaccagatcaaatcgagggatccttggctgccttccttcctgacctggccctggcaaagagaaaaacttggcgtaatccttggcgtcgtagctaccataaaaggaagaaggcagagtgggaagtcgatcccgattattgtgaagaggttcgccagacccccccatacgatagttcccatcgccttctggacgtgatggacatgacaatcttcgattttcttatgggcaacatggacaggcatcactatgaaacctttgagaagttcgggaatgagaccttcattattcacttggacaacggccgcggctttggcaagcattcccacgatgagcttagcattctggttcctctccaacaatgctgtcgtataaggagatccacataccttcgtctccaacttctggctcaagaggagcatcgtcttagtctgttgatggccgaggcattgagagctgatcgtgttgcacctgtacttttccagccccacctcgaagctctggacaggcgtctgagaatagtattgagggcagtcggtgattgtgtagaaaaagatggtttgcacagtgtggttgaagacgatttggggccagaacacagagctgccgcagggagg

SEQ ID NO: 836 - DNA, 1758 bp, synthetic construct
  source 1..1758: mol_type = other DNA
atgaaaatgattctggtgcgtcgctttcgcgtactgatccttatggcttttttggccgcatgtgcacttcatttggtgttggacctgcttcccaaactcgagcgttctgccgcccgcccttccggtgaacccggatgctcatgtgcccagcccgctgcagaggccgccgccccagggtgggcccaagctaggggacatcctggcggtgaacttgaagcagcagcttctgccgctggtgacgctggttggcccaataaacatacccttcgtattttgcaagatttttcctctgatcccagctccaacctgacaagccattccctggagaaacttccacctgctgcagaggcagctgaaggagcccctccaggccaagacccaggagtgcgtcgccccccagatcctgcacatagacctcttcctcgtgatccaggcccaagggggcccgtccttccccctggcctttcaggagatggctctctgctcactagactgtttcaacaccctctttatcaagtgcccataccaccccttaccgaaggtgatgttctgtttaacgtaaactcagacattaggtttaaccctaaagctgctacagcagaaaaccccgactggccccacgaaggccccgaagatgaatttctgccaacaggtgaggccgctgtggattcatatcctaactggctcaagtttcacatcggtattaaccgttatgagctctatagcagacacaaccccgctgtgggagccttgctgcaagacttggggactcagaaaattacctcagtggcaatgaagagtggcggaactcagcttaaacttatcatgactttccagaattacggccaagccctgtttaagcccatgaagcaaacccgtgaacaggaaacaccccctgattttttttatttttctgattatgaaagacacaacgcagagatcgctgcatttcacctcgatcgcatactcgacttccgcagggttccaccagttgcaggccgtctggtcaatatgaccaaggaaattcgcgatgtcaccagagacaagaagctgtggcgcaccttttttatatcacctgctaacaacgtatgcttctatggggaatgcagttactactgctcaaccgagcatgctttgtgcgggaagcccgatcagattgagggctccttggccgctttcttgccagaccttgctctcgcaaagcgtaagacatggcgcaatccatggaggaggagttatcacaagcgtaaaaaagctgagtgggaagtagatcccgactattgtgaggaagtccgccaaacccccccttatgatagctcccatcgcctccttgatgttatggatatgaccatatttgattttcttatgggcaacatggatcgccaccactacgagacatttgaaaaatttggaaatgagacatttatcatccacttggacaacgggagggggttcggaaaacattcccacgatgagctctccatactcgttccattgcagcagtgctgccgtataaggaggagtacatacttgcgcttgcagttgcttgctcaggaagaacaccgcctgtctctgttgatggcagaggccttgagagcagacagagtggctcccgttcttttccaaccccacttggaggcactggatcgtaggttgagaattgtactgcgcgcagtcggtgactgtgttgagaaggatggcttgcactctgtcgttgaggatgacctcgggcccgagcatagagccgcagccggtcgc

SEQ ID NO: 837 - DNA, 1758 bp, synthetic construct
  source 1..1758: mol_type = other DNA
atgaagatgatacttgtgagacgcttccgcgtccttattttgatggcctttttggctgcctgcgctctgcacttggttctggacctccttcctaaattggagcgcagtgctgctcgtccctcaggagagcccggttgctcctgtgctcagcctgccgctgaagctgcagcccctggctgggcacaagctcgtgggcaccccggcggtgagttggaggccgctgcaagtgcagctggtgacgcaggttggccaaataagcatactctcaggattcttcaggacttttcaagcgacccctccagcaaccttacatcccattctcttgagaagcttcccccagccgcagaagctgccgagggcgcaccccctgggcaggatcctggagttagacgtccacctgatcccgcccataggcctctgcctagggatcctggaccacgtgggcctgttcttcctccaggtctgtctggggatgggtcacttctgacccgcctcttccagcaccctctctaccaggtccccattcctccactgaccgaaggcgatgttctgtttaatgttaactctgacataagattcaaccccaaggcagctacagcagagaatcccgattggcctcacgagggaccagaggacgaatttctgcccacaggggaggctgcagtagattcctaccccaattggcttaaattccatattggtatcaatcgttacgagctttactcacgtcataaccctgccgttggggccctgttgcaagatctggggacccaaaaaatcacaagcgtcgctatgaagtccggggggacacaactgaagctgatcatgacattccagaactacggtcaggctcttttcaaacccatgaaacagactagagaacaagagacaccacccgatttcttctatttctccgactatgagagacacaatgccgagattgcagcttttcatcttgatcgtatcctcgatttcagacgcgtcccaccagtcgccggaagacttgttaatatgaccaaggaaattcgcgacgtgacccgtgacaagaagctgtggaggacattcttcatttctcccgcaaacaacgtgtgcttttacggcgagtgttcatattactgcagcaccgagcacgctctctgtggtaagcccgatcagatcgagggctcacttgccgccttcttgcctgacctggctcttgccaagagaaaaacatggcgcaatccatggagaaggtcttatcacaagcgcaaaaaagctgagtgggaggtggatccagattattgtgaggaggtaaggcagacccccccatatgattcctcccacagactgcttgacgtcatggacatgactattttcgattttctgatgggcaacatggatcgtcatcactacgaaacctttgaaaaattcggcaacgaaacatttataattcatttggacaacggtagaggtttcggaaagcacagccacgacgagctgtctatactggtgcctctgcagcagtgctgtcgtatcagaaggagcacttatcttcgtttgcaattgttggctcaggaggaacacaggctctctcttcttatggctgaggctttgagagctgatagagttgctccagtcctcttccaaccacacctcgaggctctcgacaggcgcctgagaatagtgcttagggctgtgggcgattgtgtggagaaagatggtctgcattcagtggtggaggatgacttggggcccgaacatcgcgctgcagctggtagg

SEQ ID NO: 838 - DNA, 1758 bp, synthetic construct
  source 1..1758: mol_type = other DNA
atgaagatgattctcgtcaggagattccgcgtactcattctcatggctttcctggctgcatgtgcacttcacctggtcttggatctgcttcccaaactcgaaagatcagcagcacgtcccagcggcgagcctggctgctcctgtgctcaacctgcagcagaagctgccgctcctggatgggctcaggctcgtgggcatcctggaggcgaactcgaggcagcagccagtgccgctggagatgctggatggcccaataagcatactcttaggattttgcaagacttcagctccgaccctagttccaatctcacctcccattcattggaaaagctgcctcctgccgccgaagccgcagagggtgccccccctggacaagatccaggcgtccgcagaccccccgaccccgcacataggccactgcctcgcgacccaggccctagaggccccgtccttcctcctgggctgtccggtgacggttcactcctcacccgtcttttccaacaccccctttaccaagtacccattccccctttgaccgaaggagacgtactgttcaatgtcaacagtgatattcgctttaatcctaaagctgctacagcagagaaccccgactggcctcatgagggccctgaggacgagtttttgcccacaggggaagctgctgtggacagttaccccaattggttgaaattccacataggaattaatagatatgagctctattctaggcacaacccagccgtaggcgcacttttgcaggatttgggcacccagaaaatcacctctgttgctatgaaaagcggggggacccagttgaaactcataatgacctttcagaactacggtcaagctctctttaagccaatgaaacagactcgtgagcaggagactcctccagattttttttacttcagtgactatgaaaggcacaacgccgaaattgcagcattccatttggataggattttggattttcgtcgtgtgcctcctgtagccggccgccttgtcaacatgactaaagagattagagatgttaccagagacaaaaagctttggcgcactttctttataagtccagctaataatgtttgtttctacggagaatgtagctactattgcagtacagaacatgctctttgcggtaaaccagaccagatagagggctcactggccgccttccttccagacctggccttggctaaaagaaagacttggcgtaatccttggagaagatcctatcacaaaaggaaaaaggcagagtgggaagtagatcctgactattgcgaagaggtcaggcagactcccccatacgattcttctcaccgcctgcttgacgtgatggatatgactattttcgattttctgatgggaaatatggacaggcaccactatgagaccttcgaaaagtttgggaatgaaacttttattatacacttggacaatggtaggggattcgggaagcattctcacgatgaattgtccatacttgttcccttgcaacagtgttgtagaatcagaaggagcacttacctcaggctgcaacttctggctcaggaagagcacagactttcccttttgatggccgaagctcttcgcgctgatcgtgtggctcctgtcctcttccaacctcatctggaggcacttgatagacgcctcaggatagtcctgcgcgcagttggggattgcgtcgagaaagacggactccacagtgtcgtagaggacgacttggggcccgagcatagagcagctgcaggtagg

SEQ ID NO: 839 - DNA, 1758 bp, synthetic construct
  source 1..1758: mol_type = other DNA
atgaaaatgatcctggtgcgtaggtttcgcgttcttatactcatggcctttctcgccgcttgtgcactgcacttggtgcttgacctgttgccaaagctggaacgctccgccgcacgtcccagcggggaaccaggctgttcatgtgcccagcccgctgcagaagcagcagcccctggttgggcacaggcaagaggtcaccctggtggggaacttgaggctgccgcttccgcagcaggagatgctggctggcccaacaagcacaccctcaggatcctccaagatttttcttccgatcctagcagtaacttgactagtcattctctcgagaagctgccacctgctgcagaggccgcagaaggggctccacccggccaggacccaggggtgaggagaccacctgatccagctcatcgccctttgccaagagacccaggtcccaggggacccgtcttgcccccaggcctgtcaggagacggttctctgcttactaggcttttccagcatccactttatcaggttcctatccccccacttactgagggagatgttctgttcaatgtcaattcagatattaggtttaatccaaaggccgcaacagccgaaaatccagactggccacacgagggacccgaggatgagtttctgccaactggtgaagctgccgttgactcctaccctaactggctcaagtttcatatcggaatcaaccgctatgagctctattcaaggcataaccctgcagtaggagcccttctccaagatctgggtacccagaaaattaccagtgtagctatgaaatcaggcgggactcagctcaaactgataatgacctttcagaactacggccaggcactgtttaaacctatgaagcaaacccgcgagcaggagactcctccagacttcttctacttttcagactacgaacgtcataacgctgaaatagctgctttccatcttgatcgtattttggactttcgccgtgtgcctcctgtggcaggacgccttgttaacatgacaaaggagatacgtgacgtgacccgcgacaagaagctgtggagaacctttttcatttctcccgcaaacaatgtatgtttctatggagaatgctcttactattgcagcacagagcatgcattgtgtggaaaacctgaccaaatcgagggatccctcgccgcattcctgcctgatctggcacttgcaaaaaggaagacttggcgtaatccttggcgtagaagctaccacaagagaaagaaagccgaatgggaagtagatcctgattattgcgaggaagtaagacaaactccaccatacgactcaagtcataggctgctggatgtaatggatatgactattttcgacttcctgatgggcaacatggacaggcatcattatgagactttcgagaagttcggtaacgagacttttattattcacctggataatggacgtggttttgggaagcactctcatgacgagctgagtattcttgttccccttcaacaatgttgccgtatacgtaggtccacatacttgcgcctgcaattgcttgcacaagaagagcacagattgtctcttctcatggccgaggccctgcgtgccgacagagtagcacccgtcctctttcaaccccatctcgaagccctcgatagacgtcttcgtattgtcttgcgcgccgtcggagactgtgtcgagaaagacggacttcattccgtagtcgaagacgatctcggacctgaacaccgcgctgcagcaggacgc

SEQ ID NO: 840 - DNA, 1758 bp, synthetic construct
  source 1..1758: mol_type = other DNA
atgaagatgatcctcgttcgtaggttcagagttttgattctgatggccttcttggcagcttgtgccttgcatttggtcctcgatcttttgcctaagctggaacgttctgcagcacgccctagtggcgagcccggttgcagttgcgctcaacccgctgcagaagcagccgccccagggtgggcacaggctcgtgggcacccaggcggagaattggaagctgctgcaagtgctgcaggagacgctggctggcctaacaagcacaccctgcgcattcttcaagatttcagctccgatccttcctcaaatctgacaagccacagcttggagaaactcccaccagctgccgaggccgctgagggggctccccccggacaagatccaggagtgcgtagacccccagacccagcccacaggcctctgcctcgtgatcccggtccccgtggaccagtacttcctccaggattgtccggtgacggttcccttctgaccagactcttccaacaccccctctaccaagtacccataccacccctgaccgagggcgatgtcttgtttaacgtgaattcagacataagattcaaccccaaggccgctacagcagagaacccagactggccccatgagggccctgaggacgagttcctgccaactggcgaggccgctgtagatagctatcccaactggctgaagttccacatcggtataaacagatacgaactctacagccgtcataatcctgctgttggggctcttcttcaagacttgggcacacaaaaaattacttctgtcgctatgaagtctggcgggacccagctcaagcttattatgacttttcagaactatggtcaagccttgttcaagcccatgaagcagacaagagaacaagaaacaccacccgactttttctatttcagtgactacgaaaggcataatgctgagatagccgccttccacctggaccgcatcctcgactttcgccgtgttccccccgtagccggacgcctggtcaatatgaccaaagagattagggacgtcactcgcgataagaaactctggcgtacttttttcatttccccagccaataacgtttgcttttacggagagtgtagctattattgctctactgagcatgccctgtgtggaaagccagatcaaattgaagggagtcttgcagccttccttcccgaccttgcactcgctaagcgcaagacatggaggaacccatggaggcgttcctatcataaacgtaagaaagcagaatgggaagtggacccagattattgcgaagaagtccgtcaaacccccccttatgattcaagccaccgcctgcttgacgttatggacatgactatctttgacttcctcatgggcaatatggaccgccaccattacgagacttttgagaagttcggtaacgaaacctttatcatccatttggataatgggaggggattcggtaaacactcacacgatgagttgagtattctcgtccccttgcagcagtgctgtcgtatacgtcgctctacttatctgcgtctgcagctccttgcacaggaagaacatcgtttgagtttgttgatggccgaggccctgagggccgacagggttgcccccgtgctgttccagccacatcttgaggccctcgatagaagactgcgtatagttcttcgtgcagtgggtgattgtgtggaaaaggatgggttgcattccgtggtagaagatgacctgggacctgagcacagggctgcagccgggaga

SEQ ID NO: 841 - DNA, 1758 bp, synthetic construct
  source 1..1758: mol_type = other DNA
atgaaaatgattctcgtccgtcgtttccgcgttcttattcttatggctttcctggctgcatgtgcacttcatttggttctggacctgttgcctaaattggaaaggtcagctgcacgcccctctggcgaacctggatgctcatgcgcccaacctgctgcagaagcagctgcaccaggctgggcccaggccaggggccatcccggcggcgaacttgaagctgctgctagtgctgccggagacgccggatggccaaataaacatactctgagaatactccaagatttttcaagcgacccaagcagtaaccttacctcacactctttggaaaaactgccccctgcagctgaggccgctgaaggggccccccccggtcaagatcctggggttcgccgcccacctgatcctgcccatagacctctcccaagagatcctggtcctaggggtcctgttctcccacccggcctttctggggacggcagcctcttgactagactttttcagcacccactttaccaggttccaattccaccactcactgaaggagacgtcctgtttaatgtcaattctgatatacgtttcaatcccaaggccgccaccgccgagaatcccgattggccccatgaaggtccagaagatgaatttctgcctaccggtgaggccgccgttgactcctatcctaattggctcaaattccacataggtataaaccgctatgaattgtactcaagacacaaccccgctgtgggtgccctcttgcaagatctgggtacacaaaagatcacctcagtagcaatgaaatccgggggcactcaattgaagcttattatgacctttcagaattacggccaggccttgtttaagcccatgaagcaaactagggaacaggaaacaccacccgactttttttacttttccgattatgaacgccataatgcagagatagcagcttttcaccttgataggatactcgattttcgccgcgttccacccgttgcaggtcgccttgtcaacatgactaaggaaatccgcgatgtaacacgtgacaaaaagctgtggcgtacattctttatatcccccgcaaataatgtgtgtttttatggggagtgcagttattactgcagcactgagcacgcattgtgcggaaagccagatcagatagaggggtcactcgccgcattcctccccgacctggcccttgccaaaagaaagacctggagaaacccatggcgtcgttcatatcataagaggaaaaaggctgaatgggaagtggatcccgactactgtgaagaagttagacaaacccccccttacgactcttcccataggttgctggatgtcatggacatgacaatattcgatttcctcatggggaatatggataggcaccattatgaaacattcgaaaagtttggtaatgaaacatttataatacatctggataacggaagagggtttggtaaacactctcatgatgagctcagcattttggtaccattgcagcagtgctgtcgcattcgtcgtagcacatacctgaggcttcagctccttgcacaggaggaacacagattgtcactgttgatggctgaggcccttagggctgatagggtagctcctgtactcttccagcctcatttggaagccctggatcgccgcttgcgtattgttctgcgtgccgtaggcgattgtgtggagaaagacggtctgcacagtgttgtggaggacgatctggggcccgaacaccgtgcagccgcagggcgt

SEQ ID NO: 842 - DNA, 1758 bp, synthetic construct
  source 1..1758: mol_type = other DNA
atgaaaatgatcctcgtgcgccgctttcgcgttctgattctgatggctttcctcgccgcatgtgccctccatttggtccttgacctccttcctaaactggaaaggtcagccgcaaggccttctggtgagcccgggtgctcatgtgcccagcccgcagcagaggccgcagctccaggatgggcacaagctagagggcatcccgggggtgaattggaagctgccgctagtgccgccggtgacgcagggtggcctaacaaacatactttgagaattcttcaagacttctcttctgaccccagcagtaatctgacctcacactctctcgagaagttgcctcctgcagctgaggctgctgagggtgcccccccaggtcaggatcccggcgtgagacgtccacccgatcccgctcacagacccctgccacgtgatcctggccccagaggccctgtacttccccccggccttagcggcgatgggtcactcttgacacgtttgtttcaacaccccctttaccaggtccccatacctccattgaccgagggggatgtcttgtttaacgtgaattcagacatcaggtttaatccaaaggctgcaaccgcagagaatcctgattggcctcatgaagggcctgaagatgagttcttgccaaccggagaggccgcagttgatagttatcctaactggttgaaattccatatcggaattaacagatatgaactgtattcaaggcataatccagccgtgggagcccttcttcaggatctgggcacccaaaaaataacatctgtagctatgaagagtggcggcacccaactcaagctgattatgacatttcaaaactacggacaagcactcttcaagcctatgaaacagacccgtgaacaagaaacacctcccgacttcttttacttttccgactacgagcgccacaatgcagagatagcagcttttcatctcgatagaatcttggactttaggcgcgtaccacctgtagctggcaggttggtgaatatgaccaaagagattagggacgtcactagagacaaaaagctttggcgtacattctttataagcccagctaacaatgtctgcttctacggggagtgttcttattattgtagtacagagcatgcactttgcggtaagcctgatcaaatcgagggatcccttgcagcttttctgcctgacctcgcactggccaagcgtaagacctggcgtaacccttggcgccgctcataccataaacgtaaaaaggccgaatgggaggtagatccagactattgtgaagaggttaggcagactcccccctacgattcttcccaccgtttgctcgatgttatggacatgaccatatttgacttcctgatgggcaatatggataggcaccactatgagacattcgaaaaattcgggaatgaaactttcatcattcatctggacaatggtaggggcttcgggaagcattcacatgatgaattgagtatacttgtcccactgcagcaatgttgtagaataaggagaagtacctatcttaggttgcagttgcttgctcaagaagaacataggctttcactcctcatggcagaagccctgcgcgcagatagagtagctcctgtattgttccagccacatcttgaggctctggatcgccgcttgaggatagtccttagagccgtcggtgattgtgtggaaaaagatgggcttcactccgtagtagaagacgatcttggacccgaacaccgtgctgcagcagggagg

SEQ ID NO: 843 - DNA, 1758 bp, synthetic construct
  source 1..1758: mol_type = other DNA
atgaagatgatacttgtacgcaggttcagggttttgattcttatggcttttttggccgcatgtgctcttcatctggtcctcgacctcttgcctaagttggaacgtagtgccgcaaggcctagcggggaacctggttgttcctgcgcacaacctgctgccgaggcagcagctcccgggtgggctcaggcaaggggacaccctggcggcgagttggaagccgccgcatcagctgccggggacgctggctggccaaataaacacacactgagaatcctgcaagacttctcttcagaccctagtagcaacttgacaagtcattcacttgaaaagttgcctcccgctgcagaggcagccgaaggagctccccccggccaagatcccggagtacgtagacctcccgatcccgctcatagacccctgcccagggatcccggcccaagaggaccagtgctccctcccgggttgtctggagacggttctctccttactcgtctttttcaacaccctttgtatcaagtaccaatccccccacttaccgagggtgacgtactcttcaacgtgaacagtgacattcgtttcaaccctaaagctgccacagcagagaatcccgattggcctcatgaaggccccgaggatgagttcctccctactggcgaggctgccgtagactcctatccaaactggcttaaatttcacatcggcataaatcgttacgaactctatagcagacacaatcccgcagttggagctttgctccaagatctcggaactcaaaaaatcacatcagtggctatgaaatccggtggcacacaactcaagcttataatgacattccaaaattacggtcaggcccttttcaaacctatgaaacagactcgcgagcaagaaacacctcccgattttttttacttcagcgactatgaaaggcacaacgctgagatcgcagcttttcacctggataggatcttggatttcagacgcgttcctccagtggcaggtaggctggtcaacatgaccaaggaaatacgcgatgttacaagggataagaaactgtggaggactttctttatatcacctgcaaacaatgtatgcttttacggagagtgcagctattattgctcaaccgagcacgctctttgtgggaaacccgatcagattgaagggtccctggccgcatttttgccagatctcgctctggctaaacgtaagacatggcgcaatccttggaggaggagttatcataaaaggaagaaagctgaatgggaagttgatcccgactattgtgaggaggtacgtcaaactccaccttatgatagtagccacagactccttgatgttatggacatgactatattcgacttcttgatgggcaatatggaccgccatcattacgaaacctttgaaaaatttggaaatgaaacttttatcatccacctggacaatggacgtggcttcgggaaacacagccatgacgagctctctattctggtacctctgcaacagtgttgtaggattcgtcgcagtacatacctgcgcctccagttgctcgcacaggaggagcatcgccttagtctcttgatggccgaagctctcagggctgatcgcgttgctcctgtgttgttccagcctcatcttgaggctctggacaggcgtcttcgtattgtacttagagcagtaggggattgcgtcgaaaaggatggccttcactctgtggtggaagatgacctcggccctgaacacagagcagctgccggccgt

SEQ ID NO: 844 - DNA, 1758 bp, synthetic construct
  source 1..1758: mol_type = other DNA
atgaagatgatcctggttcgcagatttcgtgtccttattctgatggcttttttggctgcttgcgccctgcatttggtactggatcttctcccaaaattggagcgtagtgctgccagaccctcaggcgaacctggttgtagttgtgcacagcctgccgctgaagctgccgctccaggttgggctcaggctcgtggacaccccggtggtgagcttgaagctgctgcctcagccgccggagacgctggttggcctaataaacacactttgcgcatcctccaagacttcagttcagacccttccagtaatcttacaagccactccctggaaaaactgccaccagcagctgaggccgccgaaggtgctccacccggtcaagatcctggtgtcagacgcccacccgaccctgcacataggccattgcctcgcgacccaggacctaggggacccgtactgccacctggcttgtctggtgacggttccctgcttactagactgtttcagcaccctttgtatcaagtccccattcctcccttgactgaaggagacgtgctgtttaacgttaattctgatattcgctttaaccccaaggccgccaccgccgaaaatcctgactggccacacgagggtcctgaagatgaatttttgcccaccggtgaggctgctgtcgacagctatccaaattggcttaaatttcacatcggcataaaccgctacgaactctactcccgtcacaaccctgcagtaggtgccttgttgcaggatttggggacccaaaagattacttcagtggcaatgaagtccgggggcacccagcttaagcttataatgaccttccagaattatggccaagctctctttaagcctatgaaacagaccagggaacaggaaactcctcctgattttttctattttagcgattatgagcgtcacaacgctgaaattgctgcatttcatctggacaggatcctcgactttagacgcgttccaccagtcgcaggtaggctcgtgaatatgactaaggagattcgtgatgtaacacgtgataagaaactttggaggaccttttttattagtcctgccaataatgtttgtttttatggggagtgttcctattattgttccacagaacacgctctctgcggcaaacctgaccaaatagaaggctcactcgcagccttcctccccgaccttgcacttgcaaaacgcaaaacatggcgcaacccctggagaagaagttaccataagcgcaagaaggccgaatgggaagtggaccctgactactgcgaggaggttcgtcaaactcctccctatgactcttcacatagactcttggacgtcatggatatgactatattcgacttcttgatgggtaacatggacaggcatcattatgaaacattcgagaagtttggcaatgaaacatttattatccatcttgacaacggtagaggttttggtaaacatagtcatgatgaattgtcaattctggtcccattgcagcagtgctgcaggatcaggaggtctacttatttgaggctccagcttctggctcaggaagagcacaggcttagcctcctcatggctgaagcattgcgcgccgatcgtgtagcacccgttctgttccagccccatctggaagcactcgatagacgtctgaggatcgtgttgcgcgctgtcggggattgtgtcgagaaagacggtttgcattctgtggtggaggatgacctcggtccagagcaccgcgcagccgctggacgt

SEQ ID NO: 845 - DNA, 1758 bp, synthetic construct
  source 1..1758: mol_type = other DNA
atgaaaatgattctcgtgcgtaggtttagagtgctgatacttatggcattcttggcagcatgcgcattgcatctcgtgctggaccttctccctaagctggagcgctcagcagcacgtccttctggcgaacctgggtgctcttgcgcacaaccagccgccgaagccgcagcaccaggctgggcacaagcacgtggacatcctggtggagaacttgaggccgcagcatcagctgctggagacgcaggatggccaaataagcacacactcaggatacttcaggatttctcttctgaccccagctccaacttgacttcacactctttggagaaacttcctcctgcagccgaagccgccgaaggggcaccaccagggcaagacccaggtgtaaggaggccaccagatccagcacaccgccctttgcctagagaccctggtccccgcggtccagtgcttcctcctggattgagcggagacggctcccttctcacacgtttgttccagcaccctttgtaccaagtccctatccctcccttgacagagggggatgtattgtttaacgttaattctgatattagatttaaccctaaagcagccaccgcagagaatcccgattggccccacgaaggtcctgaggacgaattcctccccaccggagaagctgccgtggacagctatccaaactggctgaagttccatatcgggataaacaggtacgagctttatagcagacataatccagccgtgggagcactgctccaggacctgggcacacaaaagatcaccagcgtggctatgaaatcaggtgggacccaacttaagcttattatgactttccaaaactacggccaggcactttttaagcccatgaagcaaactcgtgaacaagaaacacccccagattttttctatttttctgactatgaacgtcataatgccgagatcgccgcttttcatcttgataggatccttgacttcagaagggtaccccccgtggcaggacgcttggttaatatgacaaaggagattagggatgtaacacgtgataaaaaactgtggcgtacttttttcatttccccagccaataatgtctgcttctacggcgagtgtagttactactgcagtacagaacatgctctgtgtggtaagcctgaccagatagaggggagcctcgccgcctttttgcctgacctcgcattggccaaaagaaaaacttggagaaacccttggcgtcgttcttaccataaaagaaaaaaagccgagtgggaggtcgaccccgattactgtgaagaggtacgtcagactccaccttatgatagcagtcatcgcctgttggatgtcatggacatgactatcttcgacttcctgatgggtaatatggataggcaccactacgagacttttgagaaatttggcaacgagactttcattatacatctcgataacggaaggggttttgggaaacattcacatgacgaacttagtattctcgttcctctccagcaatgctgcaggattcgcagatccacttatttgagactccaattgttggctcaagaggagcataggttgtccctcctcatggctgaggcccttcgcgcagaccgcgttgctcccgttcttttccaaccccaccttgaggctcttgatcgccgtcttaggatagtccttagggctgtaggcgattgtgtcgaaaaggatggccttcattcagtggttgaggacgatcttggtccagagcacagggcagcagctggtcgc

SEQ ID NO: 846 - DNA, 1758 bp, synthetic construct
  source 1..1758: mol_type = other DNA
atgaagatgatactcgtccgtagatttcgtgtgcttatcttgatggcattccttgctgcatgtgcactccatttggtcctggacctccttcccaaacttgaaagaagtgctgcaaggccatctggcgaacctgggtgttcatgcgcccagcctgcagccgaagctgctgccccaggatgggcccaagcaagaggccaccccggtggtgaattggaagccgccgcttcagctgcaggtgatgcagggtggcccaacaagcataccctgcgcatactccaagatttcagctctgatccatcttctaacttgacctcacactcccttgaaaaacttcctcctgccgcagaggcagccgaaggagcacctccaggccaagaccctggcgttaggagaccccctgatcctgcacacagaccacttcctcgcgaccccggcccaaggggcccagtcctcccacctggactcagcggagacggttccctcctgactcgcctctttcaacatccactttatcaagttcctattccacccctcaccgagggtgacgtattgttcaacgtcaactccgatatccgtttcaatccaaaggccgcaactgcagaaaatcctgactggcctcatgagggacctgaagacgaattccttcccaccggcgaagccgccgtggactcttaccccaactggctgaaattccatatcggtatcaaccgttatgaactctatagccgccacaatcccgcagtcggagcattgcttcaggatctcgggacccagaagatcacttccgtagctatgaagtcaggcggtactcaattgaaattgatcatgacatttcagaactatggacaggctctctttaagcctatgaaacaaacaagggagcaagagaccccccctgattttttctatttctcagactacgaacgtcacaatgccgaaattgctgctttccacctcgaccgtattctggactttcgtagagtacccccagtagccgggcgcttggtcaacatgactaaagagattagggatgtgactcgtgataaaaagttgtggagaacattttttatatcacccgcaaacaacgtgtgtttctatggagaatgctcatattattgcagcaccgagcacgccctctgcggaaaaccagaccaaatcgagggttccttggccgcatttttgcccgatctggctcttgccaagaggaaaacttggcgcaacccttggcgtaggagctaccacaagcgcaagaaagccgaatgggaggtcgatccagactattgtgaagaggtacgtcagaccccaccctatgattcttcacatcgtcttctggacgttatggatatgactatatttgatttcttgatgggcaatatggaccgccatcattacgagacctttgagaagttcggtaatgaaacatttattatccacttggataatgggagaggattcggcaagcattcccacgatgaattgtcaatcctcgtcccacttcaacagtgttgcaggatacgtcgcagcacatatctgcgcctgcaactcctggctcaagaggaacacagattgtccttgcttatggctgaagcattgagagccgatagggtagctcccgtgttgttccaaccacatctggaagcactggaccgtaggctccgcatagtcctgcgcgcagttggtgactgcgtcgagaaagacggactccacagtgtagtggaggatgatcttggccctgaacaccgcgccgcagcaggtcgc

SEQ ID NO: 847 - DNA, 1758 bp, synthetic construct
  source 1..1758: mol_type = other DNA
atgaaaatgatcttggttcgtcgtttccgcgtgcttatccttatggcatttttggccgcatgcgcactccacctcgttctggacctcctcccaaagctcgaacgctccgctgcaaggccttcaggcgagccaggttgctcctgtgctcaaccagcagccgaagcagctgcccctgggtgggctcaggctcgcggtcatccaggtggtgaattggaggctgccgcttctgccgctggagacgcaggttggcctaataaacatacactgcgtatactgcaggatttctcctccgacccaagctcaaatcttaccagccactccttggagaagcttccccctgctgccgaggctgccgagggtgctcccccagggcaggaccctggagtacgtcgtccacccgatccagcacatcgtcctttgcctagagacccaggtccccgtggtcctgtacttccacccgggctgtcaggcgatggatcactgctcacaaggctgttccaacaccccttgtaccaagtcccaattcctccacttacagagggagacgtactgtttaacgtcaactcagatatacgctttaacccaaaagcagctaccgcagagaacccagattggccccacgaagggcccgaggacgagtttttgcctaccggcgaggccgcagtggacagttacccaaattggcttaagtttcatattgggataaatcgctacgaactctattctcgccataatcctgctgtaggcgctcttcttcaagaccttggtacacagaagataacctctgtggcaatgaaatcagggggcactcaacttaagcttataatgacatttcagaattacggacaagccttgtttaaacctatgaaacagactagggagcaggagaccccacccgatttcttttatttcagcgactatgaaaggcacaatgctgaaattgctgcctttcaccttgatcgcattcttgactttaggcgtgtgcctcccgtggccggtaggctcgtgaacatgaccaaggaaatccgcgacgtgacacgcgataagaagctgtggcgtacctttttcatttcccctgccaataacgtgtgcttttatggggagtgtagctattactgcagtaccgagcatgctttgtgtggtaaacccgaccagattgaaggcagcctggcagctttccttcctgaccttgcattggctaaacgcaaaacatggaggaatccctggcgccgtagctatcacaagcgtaaaaaggccgaatgggaagttgatccagattattgcgaggaagtgcgtcagactccaccatacgatagctcccacaggctgctggatgtgatggacatgacaatattcgactttcttatgggcaatatggacaggcaccattacgaaacctttgagaagttcgggaacgagactttcataatccatcttgataatggtcgcggatttggcaagcattcacatgacgaacttagcattctggtacctctccaacaatgttgtagaatcagaagatcaacatatctccgtcttcaactcctggctcaagaagagcaccgcttgtctctgttgatggcagaagccctgagggcagacagagttgcaccagtcttgttccagccccatctcgaagctctggatagacgcctccgcatagtccttcgtgccgttggggactgcgttgagaaggatgggttgcattccgtggtggaggacgatctggggccagagcacagagccgctgccgggagg

SEQ ID NO: 848 - DNA, 1758 bp, synthetic construct
  source 1..1758: mol_type = other DNA
atgaaaatgattctggtgaggagatttagggtccttattctgatggcttttttggctgcatgtgcattgcatctggtccttgatcttctgcctaagctggaacgctccgctgctcgtcctagtggagagcctggttgttcctgtgcccagcccgccgcagaggctgcagctcccggttgggctcaagccagaggtcatcctggcggggagctggaggccgccgcctcagccgctggcgacgctgggtggccaaataagcacactttgcgtattctccaggatttttcctctgaccccagctctaacttgacctcccacagcctcgaaaaactccctcctgccgctgaagcagctgagggggcacctccaggtcaggatcccggcgtcaggagacctccagacccagctcatcgtcctttgccaagagaccccgggcctaggggtcctgtcctgccccccgggttgagcggtgacggatctctgttgactcgcctcttccagcatcctctgtaccaggttccaatccctcctctcacagagggggacgtgctgtttaatgttaattcagacataaggttcaacccaaaggctgctactgctgaaaatcctgattggccccacgaaggccctgaggacgaatttcttcctactggagaagcagcagttgactcctacccaaattggctgaagtttcacatcggtattaaccgttacgaactctatagtcgccataaccctgctgttggcgctcttcttcaggacctcggaactcaaaaaatcacatccgtggcaatgaaatccggaggtacacagcttaaactcataatgacattccagaactatggacaggccctgttcaagccaatgaaacagactagggagcaggagactcctcctgatttcttctacttttccgactatgaacgccacaacgcagagatagctgcattccacctcgatcgtatacttgatttccgtcgcgtgccccccgtcgctggcaggcttgtgaatatgactaaagagatacgtgatgttactagggacaaaaagctttggcgtactttcttcatatccccagctaataacgtctgcttttacggggaatgcagttattattgtagtactgagcatgctttgtgcggtaagccagatcagatagagggtagcttggccgccttccttcccgaccttgcactggcaaagcgcaaaacctggcgtaatccctggcgtaggtcctatcacaaacgtaagaaggctgaatgggaggtcgatcccgactactgtgaggaagtacgtcaaaccccaccatatgactcttcacaccgcctcttggacgttatggatatgactatcttcgactttctcatgggaaacatggaccgccaccactatgagacctttgaaaagtttggaaacgaaaccttcattatacatcttgacaacggccgcggcttcggaaagcattctcacgatgagctcagtattctggtacctctccaacaatgttgcagaattcgccgtagtacctatctgcgcctccaactcttggcccaagaggagcacagattgtcacttctcatggcagaggcccttcgtgccgaccgtgtagcccccgtcctgttccaacctcaccttgaagccttggatcgccgcctccgcatagtcctgcgcgcagtaggcgactgtgttgagaaggatggactgcacagtgtcgttgaggacgatcttgggcccgaacaccgcgcagcagccggacgt

SEQ ID NO: 849 - DNA, 1758 bp, synthetic construct
  source 1..1758: mol_type = other DNA
atgaaaatgatcttggtcaggcgcttcagagtccttatcctgatggcctttctggcagcttgcgctctccatctcgtacttgacttgctgcccaaattggagaggagtgccgccagaccttcaggggagcccggttgcagctgcgctcagcccgccgccgaagcagcagctcccggctgggcacaagcacgcggacaccccgggggcgagctggaagcagctgccagcgcagccggcgacgctggttggccaaataagcacactcttcgtatcctgcaagacttcagctcagaccccagttctaaccttactagtcactctctggaaaaacttcctcctgccgcagaagcagccgagggggctccacccgggcaagatcccggggtgcgccgtccacctgatcccgctcatcgtcccttgccccgcgaccctggcccacgtggaccagtgttgccacctgggctctccggagatgggagtctcttgacacgtcttttccagcatcctctttatcaagtaccaatacctccactcactgagggtgacgtgctgttcaatgtcaattccgatattcgtttcaatccaaaagcagcaactgctgaaaatcccgattggcctcatgaaggaccagaggacgaattccttcccactggtgaggccgctgtagactcttatccaaattggctgaagttccatattggaatcaatcgctatgagttgtactctagacacaatccagcagtcggggccttgcttcaagatcttggcacacagaagataacctccgtggccatgaaatcagggggcactcaacttaaactcattatgacattccagaactacggccaggctctgttcaaacctatgaaacaaactcgcgagcaggaaacaccacctgattttttctatttcagtgattatgagcgccataatgccgagatcgctgctttccatctggatcgcattctcgacttccgcagagttcctcctgtggctggccgtctcgttaacatgacaaaagaaataagagatgtcacaagggataagaaattgtggcgtaccttttttatatcacctgccaataatgtctgcttctatggagaatgctcttattactgctcaaccgaacacgcactttgtggcaaacccgaccagatagaagggtctttggctgcttttctgcctgatttggcattggcaaagagaaaaacatggcgcaacccatggaggagatcatatcacaagaggaagaaggctgagtgggaagttgatcccgattattgcgaggaggtccgtcaaacacccccatatgattccagtcatcgccttctcgatgttatggatatgaccatatttgattttctcatggggaatatggacaggcaccattatgagacattcgagaagttcggtaatgagacattcataattcatcttgacaatggaagaggattcggcaagcacagccatgacgagctcagtatcttggtgcccctgcagcaatgttgtagaatccgcaggagtacctaccttcgtcttcaactccttgcccaagaagaacatagactcagtcttttgatggctgaagctctcagagcagatcgtgtagctcccgtcctgtttcagccccatcttgaagccctcgacagaaggcttaggatagtccttcgtgcagttggagattgtgtcgagaaggacggactgcatagtgttgttgaggatgatctcggaccagagcatcgtgccgctgccgggagg

SEQ ID NO: 850 - DNA, 1758 bp, synthetic construct
  source 1..1758: mol_type = other DNA
atgaaaatgattctcgtgaggagattcagggtgctcatacttatggctttcttggccgcttgtgctctgcatttggtcctggatcttcttccaaagctcgaaagatctgccgccagaccaagtggcgaacccggctgtagttgcgcccaacctgcagctgaagctgcagctcccgggtgggcacaagctcgtgggcatcccggtggagagttggaggctgctgcaagtgctgctggcgatgccgggtggcctaataagcatacattgcgtattctgcaggattttagttccgacccctcctcaaatctgactagtcattctctcgagaaacttccccctgcagctgaggccgccgaaggggcccctcctggtcaggatcctggtgttcgcagaccccctgatcctgcacatagaccactgcccagggatcccggtcctcgtggtcccgtcctgccacctgggttgtctggtgatggctcacttctgacacgcttgtttcagcatccactctatcaggtgccaattccacctttgactgagggcgacgtgctcttcaatgtcaattccgatattcgtttcaatcccaaagccgctactgccgaaaaccccgattggccacatgaggggcccgaggacgaatttctccctacaggggaggctgccgttgactcctatccaaactggctcaagttccacattggaattaatagatatgaattgtattctcgtcacaatccagcagtcggcgcactccttcaagatcttggaacccaaaaaatcacaagcgttgccatgaaaagtggaggaacacaacttaagttgataatgacattccaaaattatggtcaggccctcttcaagcccatgaaacaaaccagggagcaggaaaccccccctgatttcttttacttttccgattacgaaaggcataacgctgagatagcagcttttcatcttgacaggatactggattttaggcgtgtcccaccagtagccggcagattggtaaacatgacaaaggagatccgtgacgtgactagagacaagaaactgtggcgtacattcttcatttcccccgctaacaacgtctgcttttacggtgagtgttcctattactgctctaccgaacatgctctgtgtggaaaacctgaccagattgaaggatccctcgcagcattcttgccagatctcgcactcgcaaaacgtaaaacctggagaaatccatggcgtcgttcataccacaaacgcaaaaaggctgaatgggaagttgaccccgattattgtgaggaggtgcgtcagactcctccatatgattcatcccacaggctcctggatgtgatggacatgacaatcttcgattttctgatgggtaacatggatcgccaccactacgaaaccttcgaaaaatttggtaatgagacctttattatacatctcgacaatggccgcggatttggcaagcattcccacgatgagttgtctatccttgtgccattgcaacagtgctgcagaattaggagatcaacctacctgcgccttcaactgcttgcccaggaggagcacaggctgtctcttctgatggcagaagctctcagagccgaccgcgtagcccccgtactgttccagccacacctcgaagctctggataggagactccgcatagtcttgcgtgccgtaggtgattgtgttgagaaagacgggctccattcagtggttgaggacgatctcgggcccgagcaccgtgctgcagccggaaga

SEQ ID NO: 851 - DNA, 1758 bp, synthetic construct
  source 1..1758: mol_type = other DNA
atgaagatgattcttgtcagaagatttcgcgttctcatcttgatggcctttcttgccgcatgtgcacttcacctggtattggaccttctccctaagctcgaacgctctgcagctagaccaagcggcgagcccggctgcagctgcgcacagcctgcagcagaggctgcagcccccggatgggctcaagctcgcggccaccccggaggtgaattggaagccgcagcaagtgctgcaggtgacgccgggtggccaaataaacacacacttaggattctgcaggactttagtagtgaccctagtagcaaccttacttctcactccctggaaaagctcccacctgctgcagaagccgcagaaggggcccctcccggacaggatcctggagttcgcagaccaccagaccccgctcacagaccactccctagagatcccggcccccgtggcccagtacttcctcctggactgagtggcgacggtagtctcttgacccgtttgtttcaacaccctctttaccaagttcccataccccctttgacagaaggggacgtcttgttcaacgttaatagtgatatccgcttcaaccctaaagcagcaactgcagagaaccctgattggccacatgaaggtcccgaggatgaattcctgcccaccggtgaggcagctgtagactcttaccccaactggctcaagttccatataggaataaataggtatgaactttacagcagacacaaccctgctgtaggggcacttcttcaggacttgggcacccaaaaaatcactagtgtcgctatgaagtccggtggaacccaattgaagctgataatgacctttcaaaactatggccaggctctgttcaaacctatgaagcaaactcgtgagcaagaaactcccccagacttcttctactttagcgactacgagcgccataacgccgaaattgccgcatttcatcttgacaggattctcgatttcaggcgtgtcccccccgtagccggccgtcttgtcaacatgacaaaggagataagggacgtgacaagagacaaaaagctgtggcgtaccttttttattagcccagcaaataatgtttgtttttacggtgaatgttcctactactgctctactgaacatgctctctgtggtaagcccgatcagattgaagggtccctggctgccttcctgcccgacctggctttggcaaagcgtaagacttggagaaacccatggcgcagatcatatcataagagaaagaaagcagaatgggaagtagatcctgattattgtgaagaggtgagacagactcctccatacgacagcagtcatcgcttgttggacgttatggatatgaccatttttgactttcttatggggaacatggatcgccaccattatgaaacttttgagaagttcggtaacgagacatttataattcatctcgataatgggaggggttttggtaagcactcacatgacgagctctccatattggtgcctcttcagcagtgctgcagaattcgtaggagcacttatctcaggcttcagcttctggcacaggaggaacaccgcctcagcctgctcatggctgaggccttgcgcgcagatcgtgtggccccagttctcttccagccacacctggaagcactggatagacgcttgcgtatagtactcagagctgtgggcgactgtgttgaaaaagacggactgcatagtgttgttgaggacgatcttggtcccgagcatagagctgccgccgggcgc

SEQ ID NO: 852 - DNA, 1758 bp, synthetic construct
  source 1..1758: mol_type = other DNA
atgaaaatgatcctggtcaggagatttcgtgttctcatactcatggccttccttgcagcatgtgcattgcacttggtccttgacctcctccccaaactcgagaggtccgccgctagaccatcaggagaaccaggttgttcatgcgcacaacccgcagctgaagccgctgctccaggatgggcacaagcacgcgggcatcctgggggtgaacttgaagccgctgcttctgctgccggagatgcaggttggccaaacaagcacacacttcgcatcttgcaagacttcagctccgatccctcatctaatcttactagccactcccttgagaaactgccaccagccgccgaagctgctgagggtgctccacccggtcaggaccctggggttaggaggccccctgacccagctcatagaccacttccccgcgaccctgggcctcgcggccctgtactcccaccaggtctgagtggtgacggttctctcctcaccaggctttttcaacaccctctctaccaagtccccatcccaccactcacagagggagacgtcttgttcaatgtcaacagcgacatacgtttcaatccaaaggctgcaactgccgagaatcctgactggccacacgaggggccagaagacgaattcctgcctactggtgaggctgcagtcgactcctaccctaactggcttaagtttcatatcggtattaataggtacgaactttattctcgccataaccccgctgttggcgcacttctccaggacctcgggactcagaaaataactagtgtggcaatgaaatcagggggtacccagcttaagctcattatgacctttcagaattacggtcaggcattgttcaaaccaatgaagcagacaagggaacaagagaccccacctgacttcttttacttcagtgactatgaacgccataacgccgagatcgctgcatttcacctggataggatactggattttagacgcgtcccaccagtcgcaggaagactcgtgaacatgaccaaagaaatccgcgacgttacccgcgacaagaaattgtggaggacctttttcatctccccagcaaataacgtatgtttctatggcgagtgcagttactactgctccaccgagcacgctctgtgtggtaagccagaccaaatcgaaggtagtctggccgctttcttgccagacctcgcacttgccaagagaaaaacatggcgtaatccctggcgtcgctcctaccataagagaaagaaagctgaatgggaagttgatcccgactattgtgaggaagtgaggcaaactcccccttatgactcatcccataggttgcttgacgtgatggatatgacaatcttcgatttcctgatgggaaacatggacagacaccattacgaaacatttgagaagttcgggaacgagaccttcataattcacttggacaatggtaggggtttcggcaagcattcacatgatgagctttcaatcttggttccactgcaacagtgctgcagaatccgcagatccacttacctgagacttcagctcctcgcacaggaggagcataggttgtcactccttatggcagaagcactcagggctgatcgcgtcgcacctgtactgttccagccccatcttgaagcacttgaccgccgcctccgtattgtcctcagggcagtgggcgattgcgttgagaaggatgggctgcattctgttgtggaggacgatctcggtcctgaacaccgtgcagcagcaggcaga

SEQ ID NO: 853 - DNA, 1758 bp, synthetic construct
  source 1..1758: mol_type = other DNA
atgaagatgatcttggttaggcgctttcgtgtactcattcttatggctttcctggcagcctgcgcactccatcttgtgcttgatctcctcccaaaacttgaaagaagcgccgcccgcccttccggggaacccggttgctcttgtgcacaaccagccgcagaagctgccgcacctggatgggctcaagcaaggggacatccaggaggagagttggaggctgctgcatctgccgccggggacgctggctggcctaataaacatactctgagaatcctgcaggacttttcctccgatccaagctcaaacttgacttctcatagtcttgagaagctgccccctgcagccgaagctgctgagggtgctcctccagggcaagaccctggcgtgcgccgtccccctgacccagcacatcgccctctgcctagagatccaggtccacgtggaccagtcttgcctcctggactgtctggtgacgggtcattgcttacccgcctctttcagcatcctctctatcaagttcccattcctcccctcacagagggggatgtactctttaatgtgaattctgatatacgttttaacccaaaggctgcaactgctgaaaaccccgactggcctcatgaagggcccgaagacgaatttttgcctactggagaggctgcagtcgatagctacccaaattggttgaagttccacataggaatcaataggtacgaactttattctagacataatcctgcagtaggtgcactgctgcaggacctcggcacacagaagattactagtgtagccatgaaaagcggggggacccagcttaagttgattatgacattccagaattacggtcaagccttgttcaaacctatgaaacagactcgtgaacaagaaactcctccagactttttctacttttccgactacgaacgtcataatgccgaaatagctgcattccatttggaccgcatattggactttcgtcgtgtacctcccgtggctggtagacttgtgaatatgacaaaagaaattcgtgatgtaactagagacaagaaactctggcgcacattctttatttctcctgccaataacgtttgcttctacggcgaatgcagttattactgcagtaccgagcatgctctttgtggcaaacccgaccaaattgaagggtcactggcagcatttttgccagatctggccttggccaaacgtaagacatggcgcaatccttggcgccgcagctaccataagaggaagaaagccgagtgggaggtagaccctgactattgtgaagaggtacgtcagactccaccctatgattcatcacacaggcttttggacgtgatggatatgactatttttgatttcttgatgggcaacatggacaggcatcactatgaaacatttgagaaatttggaaacgaaacattcattatccacctcgacaatggaagaggatttggtaaacattctcacgatgaactttccatactcgtgcctcttcagcaatgctgccgtatacgtagaagtacctacttgagacttcaattgttggctcaggaggagcacagactctctttgctgatggccgaggcactgagagcagacagggtcgcaccagttctgtttcagcctcatcttgaagctctggatcgtaggttgcgtattgtacttagagcagtgggagattgtgtagaaaaagatggtcttcacagtgtcgtcgaggacgacctggggccagagcatagggccgccgctgggcgt

SEQ ID NO: 854 - DNA, 1758 bp, synthetic construct
  source 1..1758: mol_type = other DNA
atgaaaatgatactggtccgtagattcagagttcttattctgatggccttcctcgctgcatgcgctcttcaccttgtcctcgaccttttgcccaaacttgagaggtcagccgcaaggccttccggggaacctggttgtagttgtgctcaacccgcagctgaggcagctgcacctgggtgggctcaagctcgtggccatcctggtggtgagcttgaagctgctgcttctgccgccggtgacgctggctggcccaacaagcacactttgaggatactccaggatttctccagtgacccatcatctaatctcacatctcactccctggagaagttgcccccagctgctgaggcagcagaaggtgctcctcctggacaggatccaggagtgcgtaggcccccagatcccgcccacagaccactgccaagagatcccgggcctagaggccctgtgctgcctcccggactgtctggagatggtagccttttgacaagactgttccaacatccattgtaccaagtacctatacctccccttacagagggtgacgtactgttcaatgttaattcagacataaggttcaaccccaaggcagctactgctgagaaccctgactggccacatgagggacccgaagacgaatttttgcctacaggcgaagcagcagtagatagttatcctaactggttgaaattccacattggaattaaccgttatgaattgtactcaagacacaaccccgctgtgggtgcactgctgcaggacctcgggacacagaagatcacctccgttgcaatgaagagcggaggtacccagttgaaacttataatgacattccaaaattacggtcaggccctgttcaagccaatgaagcaaactcgtgaacaagaaactcccccagattttttttacttcagcgattatgagcgtcacaatgccgaaatagccgcattccatctcgatcgcatcctcgattttaggcgtgttcccccagttgccgggcgcttggtcaatatgaccaaggaaatacgcgacgttacacgcgacaaaaaattgtggagaacatttttcatcagccctgcaaacaatgtatgtttctatggggagtgttcttattactgttctaccgaacacgccctttgcggcaaaccagaccaaattgagggctcactcgctgcattcttgcccgatctggccttggccaagagaaagacatggcgtaacccctggaggagaagttaccataaaagaaaaaaagccgaatgggaagtggaccctgactactgcgaagaggttcgtcaaactccaccatatgactcttcccatagactgctggatgtgatggacatgacaatttttgacttcttgatggggaacatggatcgccaccattacgaaacatttgaaaaatttggcaatgagacattcattatccatttggacaacggaagggggttcggaaaacacagccatgacgagcttagcatcctcgtcccactgcagcagtgttgtagaattcgcaggtccacctatctccgtcttcagttgctggcacaggaggagcaccgtctctcactgctcatggccgaggctctcagagcagatcgcgtcgctcctgtccttttccaaccacacctggaggccttggaccgcaggctgcgtattgttttgcgtgccgttggtgactgcgtcgagaaagacggactccacagcgtcgtggaggacgacctgggacccgaacacagagcagctgctgggcgt

SEQ ID NO: 855 - DNA, 1758 bp, synthetic construct
  source 1..1758: mol_type = other DNA
atgaagatgatactggtgcgcagattccgcgtccttatcctgatggcttttctggccgcctgtgctctccatcttgtcttggacctcctccccaagttggaaaggagtgctgccaggccaagtggagaacctgggtgttcttgcgcacagcccgctgcagaggcagctgcacccggctgggcccaagcaaggggacatcccggtggtgaacttgaagcagcagcttctgccgctggtgacgcagggtggccaaacaagcacaccttgagaattttgcaagatttcagttccgacccctcctcaaaccttacaagccactcccttgaaaagttgcctcctgccgcagaagcagccgagggcgcacctcccggacaggaccctggcgtaaggcgtcctccagacccagcccacagaccccttccccgtgatcccgggcccagaggtccagtgcttccccctggactttcaggggatggctcactcctgacacgcctgtttcagcatccactgtaccaagttccaataccccccctgacagagggtgacgttttgtttaacgtaaatagcgatatacgttttaatccaaaagctgctactgcagaaaatcctgactggccccacgagggtcctgaagatgagttcctgcccaccggggaggctgcagtcgattcttaccctaactggcttaaatttcacatagggataaatcgttacgagctctattcacgtcacaaccccgccgtaggcgcccttttgcaggatcttggtacccagaaaatcaccagcgtcgcaatgaaatcaggggggacacaacttaagcttataatgactttccaaaattatggacaagcactctttaaacccatgaagcagacccgtgaacaggaaacccctcccgactttttctacttctccgactatgagaggcataatgccgaaatagcagccttccatctggacagaatcttggacttcagaagggttccaccagtggccgggcgtctcgttaatatgaccaaagagattagggatgtaacacgtgataaaaaactctggagaactttcttcatatcacctgcaaacaatgtttgcttctatggagagtgttcttactattgttcaaccgagcatgccctctgtggcaagccagatcagatagaggggtctctggcagcctttttgcctgaccttgcactggcaaaacgcaaaacatggaggaatccctggcgccgtagctaccacaaaagaaaaaaagctgagtgggaagtggatccagactattgcgaagaggtccgtcagacaccaccatatgactcttcacacagactgttggatgtcatggatatgactattttcgattttctgatgggtaacatggacagacatcattatgaaactttcgaaaagtttggcaacgagaccttcatcatccatctggacaatggcaggggattcgggaagcactcccatgatgagctctcaattctcgtcccacttcaacagtgttgtaggatcaggagatccacatatcttaggctgcaattgttggcccaagaggaacacagactcagcctgctgatggctgaggctctgcgcgctgacagagtggcacccgtccttttccagcctcatcttgaggccctcgaccgccgtttgcgcatagtgctcagggcagtgggcgattgcgtagaaaaggatggacttcattctgttgttgaggatgatttggggccagagcatcgcgcagcagccggccgt

SEQ ID NO: 856 - DNA, 1758 bp, synthetic construct
  source 1..1758: mol_type = other DNA
atgaagatgattctcgttaggagattccgtgtgcttatcctcatggcatttttggctgcttgtgcactccatctcgtgctggatctgctgcctaaacttgaaagatccgccgctaggccatctggtgaacccggctgttcttgtgctcaacccgcagctgaagccgcagcacctggctgggctcaagcacgcggccaccctggaggtgagctcgaagccgcagcttctgctgccggtgatgctggttggcctaacaaacacaccctcaggattctccaggattttagtagcgacccttcttctaacctgactagtcactccctcgagaaactcccacccgctgctgaggctgctgagggagcccctccaggacaggatcccggggttcgtagaccaccagatccagctcaccgtccattgcccagggatcccggcccacgtggccccgtcttgcccccaggattgtctggtgacggctccctgctcacaaggttgtttcaacaccccctttatcaggtcccaattccacccctcacagaaggcgatgttctctttaatgtaaatagcgatatacgctttaatccaaaggccgccacagcagaaaaccccgactggccccatgaagggcccgaagacgaatttcttcccacaggggaagctgctgtcgactcatatcctaactggcttaaattccatattgggattaacaggtatgaattgtatagtaggcacaatcccgcagtcggggcactgctgcaggatttgggcacccagaagatcactagcgtagctatgaagagtggcggtacacagcttaaactgataatgacttttcaaaattatgggcaggcacttttcaagcccatgaagcagaccagagagcaagaaacccctccagattttttttatttttctgactatgagaggcacaacgccgaaatagccgcttttcaccttgaccgtatacttgacttccgcagagtgccacccgtcgccggtcgtcttgtgaacatgacaaaggagatcagggacgtaaccagggataaaaaactgtggagaactttctttatttcccccgcaaacaacgtgtgcttttacggcgagtgctcctactattgtagtaccgaacacgcactgtgtggcaaaccagaccagatcgagggttctctggctgcctttcttcccgaccttgcattggctaagaggaaaacttggcgcaatccatggaggcgctcctaccacaaaagaaagaaagctgagtgggaagtcgaccctgactactgtgaagaggttagacaaacccccccttacgactcaagccatagactgctggatgtaatggacatgaccatatttgattttcttatggggaatatggaccgccatcattatgaaacatttgagaaattcggaaacgaaactttcataatccacctcgacaatggacgcggtttcgggaaacactcccatgatgagctcagcatattggtaccactccaacagtgttgtaggatcaggagatctacctatttgagattgcaacttctggctcaagaagaacacaggttgtccctccttatggcagaagctcttcgcgctgatagagttgccccagtactcttccagccccatctcgaagcattggacagaagactgagaattgtccttagagccgtcggtgactgcgtagagaaggacgggcttcattctgttgtggaagacgaccttggccccgagcaccgtgcagccgctggaagg

SEQ ID NO: 857 - DNA, 1758 bp, synthetic construct
  source 1..1758: mol_type = other DNA
atgaagatgatacttgtccgtcgcttccgtgtccttattctgatggccttcctggctgcttgtgccctgcatctcgttctggaccttctgcccaaattggaaaggtccgctgcccgtccttccggtgagccagggtgttcttgcgctcaacccgcagctgaggcagccgctccaggttgggcccaagccagaggccatccaggaggtgaactcgaggctgctgccagcgccgcaggtgatgccggttggcccaacaagcacacactgaggatcctccaagacttctccagcgacccaagctccaatcttactagtcattcccttgaaaaactgccacctgccgccgaagcagccgaaggtgcacctcctggacaggaccctggtgtgaggagaccacccgaccccgcccataggccactgcccagggatcctggtccccgtggtcccgttctgcctccaggactttccggggatggtagtctgcttacacgcttgttccagcatcctctttatcaagtgcctatacctccccttacagagggtgacgtactttttaacgtaaactccgatatacgctttaaccctaaagccgcaaccgccgaaaatccagattggccacacgaaggtcccgaggacgagtttttgcccactggtgaagcagccgtagatagttatccaaattggctgaagtttcatattggcataaataggtatgaactgtattcaaggcacaaccctgcagtcggagctttgctccaagatcttggaactcagaagatcacttctgtggctatgaaaagtgggggtactcagcttaagttgatcatgacattccagaattatggtcaggccctcttcaagcccatgaaacaaacaagagagcaggaaacccctcccgattttttctattttagtgattatgagcgccacaatgcagagatagcagccttccacctcgacaggatacttgacttccgccgcgttccccctgtcgcaggccgtctggtgaatatgactaaggaaatccgcgatgtgacccgtgataaaaaattgtggaggaccttcttcatcagccctgcaaataatgtatgcttctacggggaatgtagctactattgctcaacagagcacgctctttgtggtaaaccagaccagatcgaagggagcttggccgcttttttgcccgacctggctcttgcaaaacgtaaaacatggaggaacccttggagacgttcctaccataagaggaaaaaagccgaatgggaggtggaccccgattactgtgaagaggttcgtcagacccctccctatgacagctcccaccgcctcctggacgtcatggatatgacaatattcgatttcctcatgggaaacatggacaggcatcactacgagacctttgagaagttcggtaacgaaactttcataatccatcttgataacgggagaggcttcggaaagcattctcatgacgaattgtctattctcgttcctctgcagcaatgctgtcgtattcgccgctctacttacctccgcctgcaactgctcgctcaagaggagcacagactgagccttttgatggccgaagccctgagggcagatagggttgccccagtcctgtttcaacctcatctcgaggctcttgataggaggctgaggattgttctgcgcgctgtcggcgattgtgtagaaaaagatggtttgcacagtgtagtagaggacgacttggggccagaacatagagcagcagccggccgc

SEQ ID NO: 858 - DNA, 1758 bp, synthetic construct
  source 1..1758: mol_type = other DNA
atgaaaatgatattggtaaggaggtttcgtgttctcatcctcatggcatttctggcagcctgtgctcttcacctcgttctcgaccttctgcctaagttggaacgtagcgctgcaaggccctccggagaaccaggctgttcctgcgcccaacccgccgcagaggcagcagccccaggttgggcacaggctaggggtcaccctggaggagaattggaggcagccgcttctgctgcaggagatgcaggctggcctaataagcacacactccgcattctccaagattttagtagcgaccctagttctaatctgactagccactctctcgagaaactccctccagctgcagaggccgctgaaggggctcccccaggacaagaccccggcgtcaggagaccaccagatcctgctcaccgtcctcttccaagagaccctggtcctagggggccagtcctcccccctggactctcaggggacggatctcttctcactaggttgtttcaacaccctttgtatcaagtaccaatccctcccttgaccgaaggtgacgttctgttcaatgtgaacagcgacatcagatttaatcccaaagccgcaaccgctgagaatccagattggccacacgagggtccagaggacgagtttctgcctacaggagaggctgcagtagattcctaccccaactggctcaaatttcatatcggcatcaataggtatgaattgtatagtagacataatcccgctgtgggtgcattgctgcaagacctcggcactcaaaagatcacatcagttgccatgaagtctggaggcacccagcttaaacttatcatgaccttccagaattacggccaagctttgtttaagcccatgaaacagactcgcgagcaggaaacacctcccgacttcttttacttcagtgattatgagagacacaacgctgagattgccgccttccatttggacagaatccttgatttccgtagggtccctccagtggcagggcgtttggtcaatatgacaaaggaaatccgtgatgtaacccgcgacaagaagttgtggcgcactttctttataagtcccgctaacaatgtctgcttttatggtgagtgctcttactactgctccaccgagcacgccctttgtgggaagccagaccaaatagaggggagccttgccgcattcttgcctgacctggctctggcaaagcgcaagacctggaggaacccatggagacgtagctatcacaagcgtaaaaaagcagagtgggaggtagaccctgattattgtgaagaggtccgtcagacccccccctatgactcaagccacaggttgctggatgttatggatatgacaatttttgactttctgatgggaaacatggataggcaccattacgaaaccttcgagaagtttggtaatgaaacattcattattcatcttgataatgggagagggttcggtaaacacagtcatgacgaactgagcatccttgtgcccttgcagcaatgttgtcgcattagacgctctacttacctccgcctccagttgttggcacaagaggagcacagacttagcttgctgatggcagaagccctgagagccgaccgcgtagccccagtcctctttcagccacatctcgaggccttggacagacgccttagaatcgtccttagagctgtgggtgattgtgttgaaaaagatggacttcactcagtggttgaggatgatcttggtcccgaacacagagccgccgccgggcgc

SEQ ID NO: 859 - DNA, 1758 bp, synthetic construct
  source 1..1758: mol_type = other DNA
atgaaaatgattcttgttagaaggttccgcgttctgattttgatggcctttctggccgcctgcgccctccacctggttttggaccttctccccaaactcgaacgtagtgctgcccgtccctcaggagagcctggatgttcctgtgcacagcctgctgccgaggcagcagctccaggatgggcacaagctagggggcaccctgggggcgagctggaggctgctgcatccgccgcaggcgacgcaggatggcctaataaacacaccctgagaatcctccaggacttttctagcgacccttcatctaacctcaccagccactctctcgaaaaactcccccccgcagcagaagccgctgagggtgcccctcccggccaagatcccggcgttaggcgtcctcctgatccagctcaccgtcctctgccaagagaccccggtccccgcggacctgtccttccccccggactcagcggcgacgggagtctcttgacccgcttgtttcagcatcccttgtaccaagtacctatccccccactgactgaaggtgacgtcttgtttaacgtgaatagtgacatccgtttcaatcctaaggcagccacagccgaaaacccagactggccccacgagggtccagaagacgagttcttgcctacaggtgaggcagctgtcgactcttatcctaactggctgaagttccacatcggaatcaacagatatgagttgtatagtcgtcataatcccgccgttggggctctgctgcaggatctggggacccaaaaaatcacttccgtagctatgaagtcagggggaacccagttgaaattgatcatgaccttccagaattatggccaagcattgttcaaacctatgaaacagacccgtgagcaagagaccccacccgactttttctacttttcagattatgagcgtcacaatgcagagattgctgcatttcatctcgaccgtattctggatttccgccgcgtaccacccgtggcaggccgtctggtcaacatgactaaggaaattcgtgatgtcacacgcgataaaaaactctggcgtactttttttataagtcctgcaaataatgtttgcttttacggggaatgttcctactactgctccactgaacacgcactctgcggaaagcctgaccaaatcgagggatcattggccgctttcctgcccgatcttgccctggctaagcgcaagacttggcgtaacccttggcgccgctcctatcacaagagaaagaaggctgagtgggaggtagaccccgactactgtgaggaagttcgtcagacacctccttatgactcaagtcaccgtttgttggacgtgatggatatgacaatattcgactttttgatggggaatatggaccgccaccattacgagactttcgagaagtttgggaatgaaacattcattatccacttggacaacggccgtggttttggtaagcacagccatgatgaattgtcaattcttgttccactccaacagtgttgcaggatacgccgctctacttatttgagactccagcttttggctcaagaagaacatagactctctctcttgatggccgaggcacttcgcgctgatcgcgtggcacctgtgttgttccaaccacacctggaagcattggatcgcagacttagaattgtgctccgtgccgtaggtgattgtgtcgaaaaggacgggctccatagcgtcgttgaggatgacctgggtcccgaacatcgcgcagcagccggcaga

SEQ ID NO: 860 - DNA, 1758 bp, synthetic construct
  source 1..1758: mol_type = other DNA
atgaagatgattttggtgcgcagattcagggtcctcatattgatggcatttcttgccgcatgtgcccttcacctggtcttggatctcctgccaaaacttgagaggtctgcagctcgcccttccggtgaacctggctgcagctgcgcccagcctgctgcagaagccgctgccccaggttgggcccaggcacgcggacacccaggcggagagctggaagcagcagctagtgcagccggagacgccggttggcccaacaagcatacacttagaattcttcaggattttagttctgatcctagttcaaatctgaccagccacagccttgaaaagctccccccagcagccgaggcagcagaaggggcccctccagggcaggaccctggtgttaggcgtcctccagatccagcacataggcccctgcctagagatcccggccctcgcggtcctgtacttccacctggtctgtcaggcgatggttcactcctcactcgcctctttcaacatcccttgtatcaagtccctatcccacccctgactgagggggatgtactttttaatgttaattccgatataaggtttaaccctaaagctgctacagctgagaaccctgactggccccacgaggggcctgaagacgagttcttgccaacaggggaggctgctgttgacagttatcccaattggcttaaattccacatcggaataaatcgctacgaactctactcaaggcataaccctgcagtgggtgcacttttgcaggatctgggcactcagaaaataacctccgtcgctatgaaatccggggggactcagctcaagcttatcatgacctttcagaattatgggcaggcactctttaaacctatgaagcagactagggaacaggaaacacctccagatttcttctattttagtgattacgagcgtcacaacgccgagatcgcagccttccatttggaccgtattttggactttcgtagggtacctccagtggcagggcgcttggtaaacatgaccaaggaaattcgtgacgtgacccgtgacaaaaaactttggcgcacctttttcattagtcccgccaacaacgtgtgtttttacggagagtgcagttattattgtagcactgaacacgccttgtgtgggaaacctgatcaaatagaagggtccctggccgcctttctgccagatctggcacttgccaaaagaaaaacttggcgtaatccctggcgccgctcatatcacaagaggaaaaaggccgagtgggaagttgaccccgattattgtgaggaggtccgccagaccccaccctacgactccagtcataggttgctcgatgtgatggacatgaccatcttcgacttcctcatggggaacatggatcgtcatcattacgaaaccttcgaaaagtttggcaatgagacttttatcatacacctggacaacggtagaggctttggaaagcattctcacgatgagttgtcaatacttgttcctttgcaacagtgttgccgcattaggcgctccacatatctgagactgcagctcttggctcaggaggaacacaggttgtcccttctgatggcagaagccctccgtgctgaccgcgttgccccagtcctgtttcagccacatcttgaggccctcgaccgtagattgcgtattgtgttgagagctgtaggtgactgtgtggagaaggatgggctgcactccgtcgtcgaagacgacctgggccctgaacatcgcgctgccgcagggaga

SEQ ID NO: 861 - DNA, 1758 bp, synthetic construct
  source 1..1758: mol_type = other DNA
atgaaaatgatactggtgcgtcgctttcgcgtgctgatcttgatggcctttttggctgcatgtgctctccacctcgtacttgatttgttgccaaaactggagcgcagtgcagctcgcccctcaggtgaacctggatgcagctgcgcccagcctgcagctgaagctgcagctcctggttgggctcaagcacgcggtcaccccgggggcgaactcgaggcagctgcaagtgctgcaggcgacgctggatggccaaataagcataccctcaggatattgcaagatttctctagtgatccctcaagtaacttgacctcacattctcttgagaagttgccaccagcagccgaagcagctgagggagcacctcctggacaggatcccggtgtgaggagacccccagatcctgctcaccgccctctgcctagagatcctggacctcgcggcccagtcttgccaccaggcctgagtggcgatggaagcctcctgaccagactttttcagcatcctttgtatcaggtacccattccaccccttactgaaggtgatgtactcttcaacgtgaactccgacatccgcttcaatccaaaggctgctactgccgaaaacccagactggccacacgagggccctgaggacgagttcctcccaaccggagaagcagccgttgacagttacccaaattggttgaaatttcacattggtattaaccgttacgaattgtacagtagacataaccctgccgtaggggctttgcttcaggatctgggaacccagaagattacatcagtggccatgaagtccggtggcacccagcttaaactgataatgacctttcaaaactacggacaggcactcttcaaaccaatgaaacagacccgcgagcaagaaacaccacctgatttcttttatttttccgattatgaacgtcacaatgcagagatcgccgctttccaccttgatcgtatactggacttccgtagggttcccccagtcgcaggtagacttgttaacatgaccaaggagatcagagacgtcactagggataagaaactctggagaacctttttcatcagccctgccaacaatgtgtgcttttatggagaatgttcctattattgcagtacagaacacgccctttgcggtaaacccgaccagatagaaggtagtctcgcagccttccttccagaccttgctctggcaaagcgcaagacatggcgtaacccatggaggcgtagctaccacaagagaaagaaagctgaatgggaggtcgaccctgattattgcgaagaggtacgccaaacaccaccttacgattcatctcatcgtctgttggacgtcatggatatgacaattttcgacttcctcatgggaaacatggatagacaccattacgaaaccttcgaaaagtttggcaatgaaaccttcattatacatctcgataatggtagagggtttggaaagcattctcacgatgagctgtctatattggtccctcttcaacagtgttgccgtataaggagaagcacctatctcagacttcaactgctggcccaagaagaacacaggctttctcttctgatggctgaggcactccgtgctgatcgtgttgcaccagtacttttccaaccccacttggaagcactggatagaaggcttcgcatagtgttgcgcgccgtgggagattgtgtagaaaaagatgggctgcatagtgtggtggaagatgatctcggcccagagcatagggcagccgccggaagg

SEQ ID NO: 862 - DNA, 1758 bp, synthetic construct
  source 1..1758: mol_type = other DNA
atgaaaatgattctcgtacgcaggttcagagtattgatccttatggcattccttgcagcctgcgctctccatcttgtattggacctgctgcctaaactggagcgtagcgctgcaaggcctagtggggaacccgggtgtagctgtgctcagcctgccgctgaggctgcagctccaggatgggcacaagcacgcggacatccaggcggcgagttggaagccgctgcttctgctgcaggtgacgccgggtggcctaacaagcacactttgagaatactccaagacttcagttcagatcccagtagtaatctgacttcacattctctggagaagttgccacctgcagccgaggcagcagaaggggcacctcctggtcaggaccccggagtcaggcgtcctcccgaccccgcccataggccattgcctcgtgaccctgggccaaggggaccagttttgccccccgggttgtccggagatggttccttgctgactagactctttcagcacccactttaccaagtacccatacccccactgaccgaaggcgacgtcctctttaacgttaactcagacatacgtttcaatcctaaggcagccacagcagagaacccagattggcctcacgagggaccagaggatgagttcctgcccactggcgaggccgctgtagatagctaccccaattggctgaaatttcacatcggaatcaaccgctatgaactgtattcacgtcacaacccagccgtaggagctctgctccaggacttgggaacacagaaaatcacttctgttgccatgaaaagtggcggtactcagctgaagcttatcatgactttccaaaactatggacaggcactcttcaagccaatgaaacaaactagggagcaggagactccccccgacttcttttacttttccgactatgagaggcacaacgccgagatagcagccttccaccttgatcgcatcctggacttccgtcgtgtccctcccgtcgcaggcaggcttgtcaacatgactaaagaaattagagatgtcacacgtgataagaaattgtggcgtacattctttatcagtccagccaataacgtgtgcttctacggagaatgcagctattattgcagtaccgagcatgccctttgtgggaagcctgaccaaattgagggaagtctggccgcttttcttcctgacctggcacttgctaagcgtaaaacatggaggaacccttggagaagaagctatcataaaagaaagaaagctgagtgggaagtggaccccgattactgtgaagaggtacgccagactcccccttatgactctagccatcgtcttctcgacgttatggacatgaccatcttcgattttttgatgggaaacatggataggcatcactatgaaacatttgaaaaattcgggaacgagacatttattatacaccttgacaacggaaggggttttgggaaacatagtcatgatgaacttagcatcctggttcctcttcaacagtgttgtaggattagaagaagtacttatttgaggctccagctcttggctcaagaggaacacaggctctctctcttgatggccgaggcacttcgcgccgacagagtggcacccgtgttgttccagcctcacctggaggcccttgatagacgtctgaggatagtcttgcgtgctgtaggggactgtgtagagaaggacggcctgcactctgtagtggaggatgatcttggacctgaacaccgtgctgcagccgggaga

SEQ ID NO: 863 - DNA, 1758 bp, synthetic construct
  source 1..1758: mol_type = other DNA
atgaagatgattctggtcaggagattccgcgtgttgatacttatggcctttttggccgcatgcgccttgcacttggtacttgatttgctgcctaagttggagaggagcgcagcacgtcctagtggggaacccggctgttcttgtgctcagcctgctgcagaagccgctgccccagggtgggcacaagcaagaggccaccccggaggggaactcgaggccgcagcaagtgcagccggtgatgccggctggccaaacaaacacactctgagaattctgcaggacttttcctctgatcctagttccaatttgacttcacattccctggagaagctccctcctgccgcagaggctgctgaaggggctccccctgggcaagaccccggagttagacgtccaccagacccagcccatagacctttgccaagagatcccggtcctcgtggacctgtcttgcctcccggactcagtggggatgggagtctccttacccgtctctttcagcaccctctctaccaagtacccatccccccattgacagaaggagacgttctcttcaacgtcaattctgacatacgctttaatccaaaggcagccactgctgaaaaccctgactggccacatgaagggccagaagacgagttcctccctactggagaagccgcagttgactcttaccccaactggttgaagttccacattggtatcaatcgttatgagctttactcccgtcataaccctgccgttggggcacttcttcaggatctcggtactcagaaaattacatccgtagccatgaaatcaggcggtacacaactcaagctgatcatgacatttcaaaactacgggcaggccctttttaagcctatgaagcagacccgcgagcaggaaacccccccagattttttttacttttctgattacgagcgccacaatgctgaaattgctgccttccatctcgaccgtattctggatttccgtcgcgtaccacctgtggcagggaggctcgtcaacatgacaaaagagatcagggatgttaccagagacaagaaattgtggaggacctttttcatctcccccgcaaacaacgtgtgcttttacggtgaatgcagttactattgctctaccgaacacgcattgtgcggtaagccagaccagatagaagggtctctggccgcatttcttcctgaccttgccctggcaaagagaaagacctggagaaacccttggagacgcagctatcacaagagaaagaaagccgagtgggaagttgacccagattactgcgaggaggttagacagaccccaccttatgactccagtcaccgcctgctggacgttatggacatgaccatatttgactttctgatgggaaatatggacagacatcattatgaaacatttgaaaagttcgggaatgaaaccttcatcatacatctggacaatggtcgtggatttggcaagcatagccacgatgaactgagtatcttggtccccctccaacagtgctgtagaatacgtagaagcacatatcttcgccttcagctcctggcccaagaggagcatcgcttgagcctcctgatggcagaagcacttcgcgccgaccgcgtggctccagttctctttcaaccccacttggaagccttggatcgccgtcttcgcatagtactgagggctgtcggagattgcgtcgaaaaggatggactccactccgtggttgaagatgatcttggacccgaacatcgcgctgcagcagggcgc

SEQ ID NO: 864 - DNA, 1758 bp, synthetic construct
  source 1..1758: mol_type = other DNA
atgaagatgatcctggtgcgtcgctttagggtgctgatccttatggcttttctggccgcttgcgccctccaccttgtcctcgacctcctccctaaactcgaacgctccgcagctcgtccatctggggaacctggatgcagttgcgcccagccagctgcagaagcagctgcacccggttgggcccaggctcgtggacaccctggtggagagctcgaagctgcagctagtgccgctggcgatgccgggtggcccaataagcatacattgcgcatactccaggatttctcaagtgatccttccagtaatctcacttctcatagccttgagaaattgccacctgctgcagaagccgctgaaggagcaccacctggtcaggatccaggggtacgcagacctcctgatccagcacatagacccctgccaagagacccaggtccaagaggccccgtcctcccacctggactttctggagatggaagcctgctgactagactgtttcaacatccactgtaccaggtgccaatcccacccttgactgaaggggacgttttgtttaacgttaattctgatatccgcttcaatcctaaagccgcaaccgcagaaaatcctgattggccccacgagggtccagaagacgaattcctgcctaccggggaggctgccgttgattcttatcctaactggttgaagttccatatcggcataaacaggtatgagttgtactcccgtcacaatccagcagtgggagccctgctgcaggacctcggaacccaaaaaatcacttccgtggctatgaaatctggcggcacccagctcaagttgatcatgacatttcagaactatggtcaagctttgttcaaacctatgaaacagactagggagcaagaaactcctccagattttttttacttttcagattacgaaagacataacgcagaaatagctgcctttcatctggatagaattttggacttcaggagggtgcctccagttgctgggaggttggtgaacatgactaaggaaatcagagacgttacaagagataaaaagctctggaggactttttttatctccccagccaacaatgtttgcttttacggcgagtgcagttactactgtagtacagagcatgccctgtgtggtaagccagatcagatagaggggtctctggccgcatttcttccagacttggcattggcaaaaaggaaaacctggcgcaatccctggcgcagaagctaccataaacgtaaaaaggcagaatgggaggtcgaccccgactactgcgaagaggtgcgtcaaacaccaccctatgacagttctcacagactgttggacgtaatggatatgaccatttttgactttctgatgggcaacatggacaggcatcactatgaaacattcgaaaaattcggtaacgaaacattcatcatacatcttgacaacggtaggggatttggaaaacatagtcatgatgaactctctatcttggtgcccctgcaacaatgctgtcgcataaggagatctacatatcttaggctgcaactgctggctcaggaagaacacaggctctctttgctgatggctgaggctcttagagcagatcgtgtggctccagtgctgttccagccccatcttgaggcactcgatcgcaggctgcgtatcgtgcttagagctgtcggggattgtgttgaaaaggatgggctgcattccgtagtcgaagatgatcttggtcctgagcatagagccgccgctggcagg

SEQ ID NO: 865 - DNA, 1758 bp, synthetic construct
  source 1..1758: mol_type = other DNA
atgaagatgatactcgtccgcagatttcgtgttttgattttgatggctttcctggctgcttgcgccctgcaccttgtacttgatttgcttcccaaactggaacgcagtgccgctcgtccctctggagaacctgggtgcagttgtgcacaaccagctgccgaagccgccgctccaggctgggcacaggccagagggcatccagggggcgaacttgaggcagcagcttccgcagccggagatgctggctggcccaacaaacatactctccgcatcttgcaagacttttcatcagatccatcctctaacctgacttcacacagtcttgaaaagttgccaccagctgcagaagctgctgaaggagcccctcctgggcaggaccctggcgtcagaagaccaccagatccagcacacaggccacttcctagagatcctggtcctcgcggacctgttctgcctcccggtctcagcggcgatggatccttgcttacaagacttttccaacatcccctttatcaggtgcccattccccctctgacagagggagatgtgttgtttaatgtcaatagtgacatacgttttaatcccaaggccgccactgcagagaacccagattggcctcacgagggtcccgaggacgagtttttgccaaccggagaagctgcagttgattcatatcccaactggttgaaatttcatatagggattaatcgttatgagctgtattcccgtcacaaccctgccgtaggcgctttgctccaggatcttgggacacaaaaaattacatcagtcgcaatgaaaagcgggggaactcagctcaagcttataatgacatttcaaaattacggccaggctctctttaagccaatgaagcagacaagggagcaagaaaccccacccgactttttttacttttccgactatgagaggcataatgccgagatcgctgcctttcacctggaccgtattttggactttagaagagtcccccccgtagctggcaggctggtcaacatgacaaaagaaatcagagatgtaactcgcgacaagaaactctggcgtacattttttataagccctgcaaacaacgtatgcttttatggtgaatgctcctactattgttctacagaacatgctctgtgtggtaagccagatcaaatagaaggatctctcgccgcctttcttcctgatctcgcactggcaaaacgtaaaacctggaggaacccatggaggagaagttaccataaaaggaagaaagcagagtgggaagttgatccagactattgtgaagaagtccgccaaacacctccctatgactcaagtcacagattgctggacgttatggacatgaccattttcgactttctcatgggcaacatggacaggcaccattacgagactttcgagaagtttgggaacgagaccttcataatacatctcgataatggtcgcggttttgggaagcacagtcatgatgagttgtccattcttgtaccccttcaacagtgttgccgcataaggcgcagcacatacctgagacttcagctccttgcccaggaagagcatcgtctgagtcttcttatggctgaggcactgagagctgatcgtgtcgcccccgtgctgtttcaaccacacctcgaggcactcgacagaaggctgaggattgttcttcgtgccgtaggggactgcgttgaaaaagacgggcttcattctgtggtagaggacgacctgggacctgaacatcgtgccgcagcaggaaga

SEQ ID NO: 866 - DNA, 1758 bp, synthetic construct
  source 1..1758: mol_type = other DNA
atgaaaatgatacttgtcagacgcttccgtgtactgattctcatggcatttcttgccgcttgcgcactgcatctcgtcctcgatttgttgccaaaacttgagcgtagcgcagcacgtccctctggcgagccaggttgttcatgtgcccaaccagctgcagaagctgccgccccagggtgggcccaggctcgtggacatcccggtggagaacttgaggcagccgcctcagcagctggagacgcaggttggccaaataagcatactctgcgtatactgcaggatttctcctccgatcctagttcaaaccttactagccacagcctcgaaaaactccccccagcagccgaggccgccgagggagcaccaccaggccaggatcccggtgtcaggcgccctcctgatcctgcacataggccacttccaagggaccccggacctaggggacctgtgctcccacccggattgagtggtgatggctccctgttgacccgtctgttccagcatcctctctatcaggttccaatacccccactcacagaaggagacgttttgttcaatgttaacagcgatatacgcttcaatcctaaagcagctactgcagagaatcctgactggcctcatgagggcccagaagacgagtttttgcctacaggcgaggccgcagtagatagttacccaaactggcttaaatttcatatcggaataaaccgttatgagctgtactccaggcataatcctgctgtgggcgctttgctgcaagatcttggcacccaaaaaatcacttcagtggccatgaaatctggcggcacacagctgaagctgataatgacattccaaaattatggccaggctttgtttaaacctatgaagcaaactagggaacaggagactccaccagacttcttttacttttccgattacgaacgtcataatgctgagatcgccgcattccatttggaccgcatactcgattttaggagggtacctcctgtcgccggtcgcttggtaaacatgacaaaagaaatccgtgacgttaccagggacaagaagctttggaggaccttctttatatcaccagctaacaatgtttgtttctatggagaatgtagctactattgctcaactgaacatgctttgtgcggaaaaccagatcaaatagagggctctttggctgcattcctccccgatttggcactggccaaaagaaaaacttggcgcaatccctggcgtcgttcctatcacaagaggaaaaaggctgaatgggaagttgaccccgattattgtgaagaagtccgccaaacacctccctacgatagttcacaccgtcttttggacgtcatggacatgacaatctttgatttcttgatggggaatatggatcgtcatcactatgagacctttgagaaatttgggaatgaaacctttattattcacctggataacggtcgtgggtttggtaaacactctcacgatgaactgtcaatactcgttcccttgcagcagtgctgtaggatcaggcgctccacatatctgagattgcaactccttgcacaggaggagcataggttgtctcttctcatggctgaggccctgcgtgctgatcgtgtagctccagtgctgtttcaacctcacctggaggccctcgaccgtagattgcgcatagtccttagggctgttggggattgcgtcgaaaaggatgggttgcacagtgttgtagaagatgatcttggaccagaacatcgtgccgctgctggcagg

SEQ ID NO: 867 - DNA, 1758 bp, synthetic construct
  source 1..1758: mol_type = other DNA
atgaagatgatcttggtgcgccgcttcagggtccttatcctcatggctttcctggctgcttgcgctttgcacttggttctcgatttgctccccaagctggaacgcagtgctgctaggccttctggggaacctgggtgttcctgcgcccaacccgctgcagaggctgccgccccaggatgggcacaagcaagaggccatccaggtggcgagctggaggcagctgcttctgccgctggagacgcaggatggcccaacaaacacacccttagaatactccaagacttcagttctgatccatccagcaacctgacttcacattccttggagaaactgcccccagctgccgaggccgcagaaggagccccaccaggtcaggatccaggcgtccgtagaccaccagaccccgcacataggccactgcccagagatcctggtcctagagggcctgtactgccacctggcctctcaggcgatggctctttgctgaccagactgtttcaacaccctctttatcaagttccaattcccccattgactgaaggagacgtgctcttcaatgtgaactctgacattcgtttcaaccctaaagctgccactgccgaaaatccagattggcctcatgagggccccgaggatgaatttctgccaacaggtgaagcagctgtggacagttaccccaactggcttaagtttcacattggtattaacaggtatgaattgtactccaggcataaccccgctgtcggcgccttgcttcaagacctcgggacacagaagatcaccagcgtcgcaatgaagtctggggggactcaattgaagctgatcatgaccttccaaaattacgggcaggcactctttaagcctatgaagcaaacaagagagcaggagaccccccccgatttcttttacttctcagactacgaaaggcataacgctgagattgccgcctttcatctggatagaatattggacttccgcagggtgcctccagtagctgggcgcttggtgaatatgactaaagaaatccgtgacgtgactcgtgacaaaaaactgtggagaacatttttcatatctcccgcaaacaatgtttgtttttacggtgaatgcagttactactgttctaccgagcatgccctttgcggtaagcccgatcagatcgaaggtagtctcgcagcttttctccctgacttggcattggcaaaacgtaagacttggcgcaatccctggaggcgtagctaccataagagaaaaaaagcagagtgggaggtggatcctgattactgcgaggaggttcgtcagacccccccctatgacagcagtcatagactgcttgatgtgatggatatgactattttcgatttcctcatgggaaacatggataggcaccattacgaaacctttgaaaagtttggcaacgaaaccttcataattcatttggacaacggaagggggttcggcaaacattctcatgacgagctgagtatcctcgttcctctgcaacaatgttgtagaatcaggaggtcaacctacctccgcctccagttgcttgctcaagaggagcataggctgagcctccttatggcagaagccctgagagctgatcgcgtcgcccctgtcttgtttcaacctcatttggaggctcttgataggaggctgagaattgtactgagggcagtgggtgattgtgttgagaaagacggcttgcatagtgtggttgaggatgatcttggaccagagcatcgcgccgccgctggccgc

SEQ ID NO: 868 - DNA, 1758 bp, synthetic construct
  source 1..1758: mol_type = other DNA
atgaagatgatacttgtacgtcgtttccgtgtcctcatcctgatggcttttctggctgcctgcgcactgcacttggttctcgacctgcttccaaaattggaaaggtctgcagctcgcccatcaggcgagcccgggtgtagttgtgcccaacccgcagctgaggcagcagcacccggctgggctcaagccaggggtcatccagggggcgaactggaagctgccgcctctgccgctggcgacgcaggctggccaaataaacatacacttcgcatactgcaggacttttcaagtgatccaagttctaacctcacaagtcactccttggaaaagctgcctcccgcagcagaggctgctgaaggcgcaccccccggccaagatccaggagtcaggaggccacccgatcccgcccatagacccttgccaagagatcccgggccacgcggaccagtccttccacctgggctttcaggggacggtagtctccttacccgtctgttccagcacccactgtatcaggtgcctattccacctcttaccgagggagatgtactgtttaacgtgaacagcgacataaggttcaatcccaaggcagccaccgcagagaacccagactggcctcatgaaggccccgaagacgaattcttgcctacaggggaagctgctgtcgatagctatcctaattggttgaagttccacattggtataaatcgctatgagctgtactcaagacataaccccgctgtgggggcactgctccaagaccttggaacccagaagattactagtgtagcaatgaagagtgggggcactcaacttaagttgattatgacattccaaaattatggccaagccctttttaagcctatgaaacagactcgcgagcaggaaacaccaccagattttttttacttctctgactatgagcgtcataacgccgaaatcgctgcatttcacttggataggatcctggactttagaagagtcccccctgtggctggcagactggtaaatatgaccaaggagatcagggacgttaccagagacaaaaagctctggagaaccttcttcattagtccagccaataacgtttgcttctacggtgaatgttcttattactgtagcaccgagcatgccctgtgcggaaaacctgatcagatagagggctcattggcagcatttctgcccgacttggcccttgcaaagcgcaagacatggcgcaatccttggagacgttcataccacaaacgcaaaaaagctgagtgggaggtagatccagattactgtgaggaggtgagacagacacctccttacgactccagtcaccgcttgcttgacgtgatggatatgactattttcgactttctcatgggaaacatggacagacaccattatgagacatttgaaaaattcggaaacgaaacttttataatccacttggataatggtaggggcttcggcaagcacagccatgacgagctcagtatcctggtccccctccaacagtgttgcaggattaggcgtagtacctacttgcgtctccagttgctggctcaagaggagcatcgtttgtctctgttgatggcagaggctttgagggccgatagggttgcacctgtcttgtttcagccccatcttgaagctctggatcgccgtcttcgcatagtacttagagccgtcggcgattgtgtagagaaggacggccttcattcagtggttgaggacgacctgggccctgaacatagggctgctgccggcaga

SEQ ID NO: 869 - DNA, 1758 bp, synthetic construct
  source 1..1758: mol_type = other DNA
atgaagatgatattggtgcgcagatttcgtgttcttattctcatggccttcctcgctgcttgtgccctccatttggtcctggatttgctgccaaagctcgagaggagcgcagctcgtccctccggagagcctggttgtagctgtgcccaacctgcagccgaagcagctgcccctggctgggcacaagcaaggggacacccaggcggtgaacttgaggccgcagcatctgctgcaggggatgccgggtggccaaacaaacacactcttaggatattgcaggatttttctagtgatcccagtagtaatctcacctctcacagtcttgagaagctgccaccagcagccgaggccgctgagggtgctcctccagggcaagaccccggggttcgtaggcccccagatcctgctcatagaccactgcctagggatccaggtccaagaggacctgtattgccacccggcttgtccggggacggctcactgctgactagactttttcagcatcctctctatcaggtccccattccccccctgacagagggcgacgtcctttttaacgttaacagcgacattaggtttaatcctaaggctgctacagctgagaaccccgactggccacacgagggtccagaggatgaattcctgcccactggggaggctgctgtagattcctatcctaattggctcaaattccatatcggtattaacagatatgagctctattctcgtcataaccctgctgtcggtgctcttttgcaagatcttggcacacaaaagatcacatctgttgcaatgaagagtggggggactcagcttaagcttattatgacatttcaaaattacggccaagcactctttaagcccatgaagcagacccgtgaacaagagaccccccctgacttcttttacttttccgattatgaaaggcataatgcagagattgcagccttccaccttgacagaatactcgattttcgcagggtaccccctgttgcagggcgcctcgtcaacatgaccaaggaaatacgtgatgtgacacgcgataaaaaactttggcgcacattcttcatctcacccgcaaacaatgtgtgtttttacggggaatgctcttactactgtagtaccgaacatgccctttgcgggaagcctgatcagattgagggttcactcgccgcatttttgcccgacctcgctctggcaaaacgcaaaacatggcgtaacccttggaggcgtagctatcataaacgtaagaaagcagagtgggaagtcgatcctgattattgcgaggaagtccgccagacacctccctacgacagttcacataggctccttgatgttatggatatgactatattcgacttcctcatgggtaatatggacaggcatcattacgagacctttgagaaattcggaaatgaaactttcatcatacaccttgataacggaagaggctttgggaagcacagccatgacgaactttctatactggttcccttgcaacagtgctgtcgcattagaaggtccacttaccttcgtttgcagctcttggctcaggaagagcacaggctgtccctgctgatggctgaagctctccgcgcagacagagttgcccctgtgcttttccagccacatcttgaagcattggatcgtcgcttgcgtatcgtcctccgcgccgttggagactgtgttgaaaaggatggactgcactccgtggtagaagatgatcttggccccgaacacagggccgccgccggtagg

SEQ ID NO: 870 - DNA, 1758 bp, synthetic construct
  source 1..1758: mol_type = other DNA
atgaaaatgattcttgtcaggcgttttcgcgttctgatcctcatggcattcctggcagcttgtgcactccacttggtgctcgatctcctccccaaactggaacgctccgctgcaagacccagtggcgagcccggttgcagttgcgctcagcctgctgcagaagccgccgccccaggctgggctcaggctaggggacatcctggtggggagttggaagccgcagcaagtgcagccggagatgcagggtggcccaataaacatacattgcgcatcctgcaggatttcagcagtgacccatctagcaatctcacatcccactccctggagaagttgcccccagctgctgaagccgcagagggcgctccacccggacaagacccaggtgttcgtagacccccagatccagctcatcgtcctctccctagggacccaggcccaaggggccctgtgcttcctccagggctgtccggcgacggctctcttcttacccgcctgtttcagcatccactttatcaagttccaatccccccactcacagagggagatgtgctgttcaacgtgaattctgatatccgtttcaatcctaaagcagctacagctgagaatcctgactggccccacgaaggtcctgaggacgaattcctgcctaccggagaagctgccgttgattcataccctaattggcttaaatttcatattggtatcaaccgctatgagctgtactcccgccacaatccagccgtaggagctcttctccaggatcttgggactcagaagataacaagcgtagccatgaaaagcggcggtactcaattgaaactcattatgacttttcaaaactacggtcaggctttgtttaaacccatgaaacagaccagagagcaagaaacacctccagacttcttttactttagtgactatgaaaggcacaatgccgagatcgcagctttccacttggaccgcattttggactttaggagggtaccacctgtagctggcaggcttgtgaacatgacaaaagaaataagggacgtgactagagacaagaaactttggcgtaccttcttcataagccccgcaaataatgtctgtttctatggagaatgttcttactattgtagtacagaacacgcattgtgtggtaaacccgatcagattgaggggtccttggcagccttccttccagatcttgctcttgccaaacgtaagacttggcgcaacccttggcgcagatcatatcacaagcgtaagaaggcagagtgggaagtagatccagactattgtgaagaagtacgtcaaacaccaccctacgacagctctcataggttgctcgatgtgatggatatgaccattttcgacttcttgatgggcaatatggaccgtcatcactatgagacattcgagaagtttggaaatgaaacatttattattcatctcgataatggaaggggtttcggaaaacactctcacgatgaattgtcaatccttgtccccctgcagcaatgttgccgtatacgccgttcaacatatttgaggttgcaactcttggctcaagaagagcaccgcctgtcattgctcatggccgaggccctcagagcagaccgtgtagctccagtactttttcaaccacatttggaggccctggacagaagattgaggatagtgctccgtgcagtgggagactgcgtcgagaaggatgggctccacagtgtggtggaggatgaccttggtccagagcaccgtgctgctgccgggagg

SEQ ID NO: 871 - DNA, 1758 bp, synthetic construct
  source 1..1758: mol_type = other DNA
atgaagatgattctggtccgtaggtttcgcgtattgatcttgatggcattcctcgccgcatgtgcactccacctcgtgctggacctgcttccaaaattggagaggtccgccgccaggcctagtggggaacctggatgctcatgcgcccagccagcagcagaggccgcagccccaggttgggcccaagcaagaggacatcctggtggggaactggaagcagcagcctcagctgcaggggacgccggttggcccaacaagcatacacttcgcatcttgcaagactttagttcagatccctctagcaacctcacatctcactctcttgagaaattgccaccagcagccgaggctgcagaaggagccccaccaggacaggatcccggcgtaagaagacctccagaccccgctcacagaccccttcccagagacccaggccctcgcggccccgtattgcccccaggcttgtccggtgacggatccctgttgactcgtctcttccagcacccactctatcaggtccctattccacccctgacagaaggcgatgtacttttcaatgtcaactccgatatcagatttaatcctaaggctgctaccgcagagaaccctgattggccacatgaaggtcccgaggacgagttcctgcccacaggagaggctgctgtagattcttatcccaactggcttaaatttcacataggaataaaccgctatgaactctattcaaggcacaaccccgctgtgggtgcactgctgcaagacttgggcacacagaagataacaagtgtggccatgaagagcggggggactcagcttaaattgattatgacattccaaaattacggtcaggcactgttcaaacctatgaagcaaactagggaacaggaaacccccccagactttttttatttttccgactacgagcgtcataatgccgaaattgccgctttccacctcgaccgtatacttgactttcgtcgcgtcccaccagttgcaggtcgtcttgtcaacatgactaaggagataagggatgtaactcgtgataagaaattgtggagaacattttttataagtcctgccaacaatgtgtgtttttacggtgagtgttcatattattgctccactgagcatgccctttgcggaaaaccagaccaaatagagggctccctcgccgcttttcttccagatcttgcacttgctaaacgcaagacttggcgcaacccatggaggagatcataccacaaaagaaaaaaagccgagtgggaggttgatccagactattgtgaagaggtccgccagactcccccttacgattcttctcacagacttcttgatgtcatggacatgacaatctttgatttcctgatgggcaacatggaccgtcatcattacgagactttcgagaaattcggcaatgagaccttcattatccatctggacaatggcagaggctttggtaagcactctcacgatgagctgtcaatcctcgtcccattgcaacagtgttgccgtataagaaggagtacttacttgcgtctccagttgcttgctcaggaggaacaccgcttgagtttgctcatggcagaagccctcagagccgacagagtagccccagtactgttccagccccatttggaggctcttgacaggcgtctgcgtattgtgctgcgcgctgttggagactgcgtggaaaaggatgggctgcactccgtggtcgaggacgatcttggacctgaacaccgtgcagcagccggtcgc

SEQ ID NO: 872 - DNA, 1758 bp, synthetic construct
  source 1..1758: mol_type = other DNA
atgaaaatgatacttgtccgtagattcagggtgcttatccttatggctttcctcgccgcttgcgccttgcacttggtgcttgaccttcttcccaaactcgaacgttcagctgcccgccctagcggggagcctggatgctcatgcgctcagccagccgccgaagcagctgcacccggttgggcacaggctcgtggtcacccaggaggtgagctggaagccgccgcatctgctgctggcgacgctggctggccaaacaaacacactctgcgtatactccaagatttctctagtgatccatcctctaatcttactagccattctcttgaaaagctgcctcctgcagccgaggccgccgagggcgctcctccagggcaagatcccggcgttaggaggcctcccgatcccgctcatcgtccattgccacgtgatccaggcccacgtggcccagtacttccccctgggttgagcggcgatggaagcttgttgacccgccttttccagcaccccctctatcaagttccaataccaccccttactgagggcgatgtgttgtttaatgtaaacagtgacatccgctttaaccccaaggcagcaactgccgagaaccccgactggccccacgagggacctgaggacgaattccttcctactggcgaggcagccgtagattcttatccaaactggttgaaattccacataggtataaacaggtacgagttgtactctcgtcacaatcccgccgtaggtgccctgctgcaggacctgggaacacagaagattacctctgttgctatgaagagtggcgggactcagctcaaattgataatgactttccaaaattacggacaagccctgttcaaacctatgaaacaaacaagggagcaagagaccccaccagactttttttactttagtgattatgaacgtcataacgccgagatagcagccttccatctcgatcgtatccttgatttcaggagggttcccccagtagccggaaggttggtcaatatgactaaggagattagggatgtcacacgcgataagaaactctggcgcactttctttattagtcctgcaaataacgtctgtttttatggggaatgcagctactactgttcaacagagcatgcactctgtggtaaacccgatcagattgaggggtccctggcagcattcctccctgatctcgctcttgcaaagcgtaaaacatggcgtaatccatggaggaggtcataccacaagaggaagaaggcagaatgggaggtagaccctgattattgcgaagaggtacgccagactcccccctatgatagttctcataggttgctggacgttatggatatgaccatattcgactttttgatgggcaatatggatcgtcatcactatgagactttcgagaaatttggaaacgaaacatttataatccacctggataacgggagaggattcggtaagcatagccatgatgagctgtctatcctcgtacctttgcaacaatgctgtaggatcagaagatcaacttacctgcgcttgcaactcctggctcaagaagaacataggctgtcacttctcatggctgaggcactgagagcagatcgtgtagcacccgtcctctttcagccacatttggaagctctcgatcgtaggctccgcattgtgcttagagctgttggagactgcgtggagaaagacggtctgcacagcgtggttgaggacgatcttgggccagagcacagagcagccgcagggagg

SEQ ID NO: 873 - DNA, 1758 bp, synthetic construct
  source 1..1758: mol_type = other DNA
atgaaaatgatccttgttaggcgctttagagtgttgatccttatggcttttctggcagcatgcgcactgcatctggtcctggatttgcttccaaagcttgagcgttccgccgcccgcccttcaggcgagccaggatgttcctgtgctcaacctgctgctgaggccgctgctcccggctgggctcaagcaagagggcatcctggtggcgaattggaagccgctgctagcgccgcaggtgacgctgggtggcccaataagcatacacttaggatcctgcaagacttttcttcagacccaagcagcaacttgacaagccactctctggaaaaattgccaccagccgctgaagctgcagagggtgctccaccaggtcaggaccctggtgttagacgtcctcccgatcccgcacataggcctttgcctagagatcctggacctaggggtccagtactgcccccaggactgtcaggcgatggctcactcctgaccagactttttcagcatcccctgtaccaggtgccaattcctccacttactgagggagacgtactttttaacgtcaactccgacataaggttcaaccccaaagctgccactgctgagaatccagactggcctcatgaagggcccgaggacgagttccttcccaccggcgaggctgcagtcgattcatatccaaattggctgaaattccacataggaattaacagatatgaattgtattcccgccacaaccctgcagtcggcgccctcttgcaagatctcgggacccaaaaaatcaccagcgttgctatgaagagtggggggacacagctcaagttgataatgaccttccagaactacggtcaggctctttttaagcccatgaagcagaccagggagcaagaaacaccaccagattttttctactttagcgactacgagaggcacaacgctgagatagcagccttccatcttgaccgcattttggatttcagaagagtacctcctgtggctggaagattggtgaatatgactaaggagataagggacgtgaccagggacaaaaaactctggaggactttctttatttccccagccaacaatgtctgtttttacggggaatgctcatattattgctctactgagcacgccctttgcgggaaacctgatcagattgagggatccctggccgcctttttgccagacttggctttggccaaacgcaagacatggaggaatccttggcgtcgctcctatcacaaaagaaaaaaggcagaatgggaggtagacccagattactgcgaggaggtcaggcaaactcccccctacgactcttcacaccgtcttctggatgtgatggacatgactatctttgactttctgatgggaaatatggaccgtcaccattatgagacttttgaaaaatttggcaatgaaacttttattatacatctcgataatggaagaggcttcggcaaacattcccacgacgaattgtctatcttggttccactgcagcaatgttgtaggataagaagaagtacttacttgagactgcaactgctcgcacaggaagaacaccgcctcagtcttttgatggccgaggccctgagagctgaccgcgtagctccagtactgtttcagcctcacctcgaggctcttgatcgccgtcttagaatcgttttgcgtgctgtgggtgactgtgttgaaaaagatgggcttcattctgtcgtagaagacgacctcggccccgaacatagagccgcagccggacgt

SEQ ID NO: 874 - DNA, 1758 bp, synthetic construct
  source 1..1758: mol_type = other DNA
atgaagatgattcttgtcaggcgcttccgcgtacttatcctcatggcatttcttgccgcctgcgccttgcatttggttctcgatctgttgccaaagttggaaaggagtgcagcaaggccatcaggcgagccaggctgcagttgcgcacagccagcagctgaagcagctgcccctggctgggctcaagctagaggtcaccccggaggtgagcttgaggccgcagcatctgccgctggcgacgctgggtggcctaacaaacatactctgagaatacttcaagatttttcttcagaccctagcagcaacttgacctcacatagtctcgagaagcttcccccagccgccgaagcagccgaaggtgcaccacctggtcaggatccaggcgttaggcgtcctcccgaccccgcacaccgccctctgcctcgtgatccagggcccaggggtcctgttctgccacctggcttgtcaggtgatgggtctttgcttacaaggctcttccagcaccccctttaccaggtaccaattcctcctctgacagaaggcgatgtgctgttcaatgttaattcagatattcgtttcaacccaaaggccgctaccgccgagaaccctgattggcctcacgagggtccagaagacgagttcttgcctaccggggaggcagccgtcgactcctatcccaactggcttaaatttcatattggtatcaatagatatgaactctattctagacacaatccagccgttggtgctctccttcaggatcttggtacccagaaaatcacaagtgtcgcaatgaagagtggaggaacacaattgaagcttattatgacattccaaaactatggtcaagccttgtttaagcccatgaagcaaacaagagagcaggagacacccccagacttcttctacttttctgattacgagcgccataacgctgaaattgcagcttttcaccttgatcgtatcctggattttcgcagagtacctccagtggccggaaggctggtgaatatgaccaaggaaataagagacgtgaccagagacaagaaattgtggcgtactttttttataagccccgcaaacaacgtgtgtttttatggagagtgttcatactattgtagtaccgagcacgccctctgtggcaagccagatcaaatagaagggtctctcgcagcatttttgccagacctcgcactggcaaaaagaaagacctggagaaatccctggaggcgtagctatcataaacgtaagaaggctgaatgggaagtagaccccgattactgcgaagaagtgcgccagactccaccatacgactcttctcatagattgctcgatgtcatggacatgaccatctttgatttcttgatgggtaacatggatcgtcaccactatgaaacattcgagaaatttggcaatgaaactttcataatacatctcgataacggccgcggtttcgggaagcatagccacgatgaactgagcatcctcgtccctttgcaacagtgttgtcgtattagaagatcaacctacctgaggctgcagttgctggcccaagaggaacatcgtctttctctgttgatggctgaggcacttcgcgcagatcgtgtggcacctgttctcttccaaccacatctggaggctctggataggcgtttgaggattgtgctgagagctgtcggggactgcgtcgaaaaagatggcctccattctgtggtcgaagacgaccttggacctgaacatagagcagccgctggccgc

SEQ ID NO: 875 - DNA, 1758 bp, synthetic construct
  source 1..1758: mol_type = other DNA
atgaagatgatattggtgcgccgttttagggtgctcatactgatggccttcttggctgcatgcgcacttcacctcgtgttggacctgctgcctaagcttgagagatcagccgccagacccagcggggaaccagggtgttcttgtgcccaacccgctgctgaggccgcagcacccggatgggcccaggccaggggtcatcccggaggcgagctcgaggctgcagccagtgctgcaggagatgcagggtggccaaataaacatacacttaggatacttcaggatttcagctctgatccttccagtaacctcacctcccattctctcgagaagttgcccccagccgcagaggccgctgaaggcgctcctcctggtcaggatcctggagtccgccgtcctcctgaccccgcacataggcctctgccccgtgaccctggaccccgtggcccagtacttcctcccggcttgtccggggatgggtctcttctgacccgcttgttccagcaccctctttaccaagtaccaataccaccacttactgaaggggatgtcctgttcaatgtcaactcagatatccgctttaatcccaaagcagccacagctgaaaacccagattggccccatgaagggcccgaggacgaattcttgcccactggggaggctgcagtagatagctaccccaattggctcaaattccacatcgggattaaccgctatgagctttattctcgccacaatccagcagtcggcgccctcctccaagatctcggaacacagaagattacatcagtcgccatgaagtcaggtggcacacagctgaagctcataatgactttccaaaattatggtcaagccttgtttaagcctatgaaacaaactcgcgagcaggagacaccccccgattttttttacttttctgactacgaaaggcataatgcagaaatcgctgcttttcacctcgatcgcattcttgactttcgccgcgtccctcctgtagctgggaggctggttaatatgacaaaagagattcgtgacgtaacccgcgacaagaagctgtggagaacattttttatttcacctgctaacaacgtgtgtttttacggcgagtgttcttactattgtagcaccgagcacgctctgtgtggaaagcctgaccaaatcgaaggctcactggccgctttcctccccgacctcgcactcgctaagcgcaagacttggcgtaatccttggagaaggagctatcataagaggaaaaaagccgagtgggaagtcgaccctgattattgcgaggaggtgagacagacccccccttatgacagtagtcatcgtctgcttgatgtaatggacatgacaattttcgacttcttgatgggtaatatggatcgtcatcattacgagacatttgagaagttcggtaacgaaactttcattattcatttggataacggtaggggtttcggcaaacactcacacgacgagctctccattctggtgcctttgcaacagtgttgccgtattagacgttcaacttatcttcgccttcaactccttgctcaggaggaacacaggttgtcactgctcatggcagaagcactccgcgctgatagggtcgcaccagttctgttccaaccccacctcgaggcactcgacagacgcttgcgtattgtgcttcgtgcagtaggcgattgtgttgaaaaagatgggctgcacagcgtcgtggaggacgatttgggtccagagcacagagcagccgctggcaga

SEQ ID NO: 876 - DNA, 1758 bp, synthetic construct
  source 1..1758: mol_type = other DNA
atgaaaatgatcctcgttaggagatttcgtgtgctcatcctgatggcattcctcgcagcatgcgccctccaccttgtgctggatctcctgcccaaactggaacgttctgccgcccgtccatcaggtgagcctggatgctcctgtgcccagccagcagcagaggctgctgccccaggttgggcacaggcaagggggcaccccggaggtgaactcgaggctgctgcttccgctgcaggtgatgccgggtggcctaataaacacaccttgaggattctccaggatttctccagcgatccatcatctaacctgaccagccactcattggagaaacttccacccgccgcagaggcagctgaaggtgcccccccagggcaagatccaggggttcgtcgtccccctgatcctgctcaccgtcctctccctagggatcccggtccccgtggccccgtgcttccacccggattgtcaggggacggcagtttgttgactagactttttcaacaccccttgtaccaggttcccattccaccactgacagaaggcgacgttctgttcaacgtaaatagtgatattagattcaatcctaaagctgctacagctgagaaccccgattggccacatgaaggacccgaggacgaatttcttccaacaggtgaagctgctgttgatagttatcccaactggttgaagtttcatattggaataaaccgctacgaattgtacagtagacacaatcctgcagtcggtgccttgctgcaggaccttggcacacaaaagattacaagtgtagccatgaagagtggtggcactcagctcaagcttatcatgacctttcaaaactatggacaagccctgtttaaacccatgaagcagacccgtgaacaggagaccccacctgatttcttttacttttctgactacgagcgccacaacgctgagatcgccgcttttcatctggataggatacttgatttccgtagagttccacccgtcgcagggagacttgtaaatatgacaaaggagattcgtgatgtcacaagggataagaagctctggcgtaccttcttcattagtccagcaaacaacgtttgtttttatggagagtgttcttattactgcagtaccgaacatgccctctgtggtaaacccgaccaaatagaagggtctttggccgcattcctgccagacctggcattggcaaagcgtaaaacttggcgtaatccctggcgtaggtcataccataagcgcaaaaaggctgaatgggaagtcgaccctgattattgcgaagaagtccgccaaactcctccctacgacagttcccacagactgttggatgtgatggatatgacaatattcgattttttgatgggaaatatggacaggcatcactatgaaacctttgagaagtttgggaatgagacatttataatccatctggacaacgggcgcggctttgggaagcatagccatgacgagttgagtattcttgtcccattgcaacaatgttgtagaataaggcgcagcacctacttgcgcttgcaacttctcgcacaggaggaacatcgcctgtctctcctgatggccgaagctcttcgcgccgatagggtagcccccgtactgtttcaacctcatctggaggcacttgaccgtcgtctgcgtattgttctcagagctgtgggggattgcgtggagaaggatggactgcactcagtcgtagaggacgatctgggcccagaacacagggccgcagccggcagg

SEQ ID NO: 877 - DNA, 1758 bp, synthetic construct
  source 1..1758: mol_type = other DNA
atgaaaatgatactcgttcgtcgtttccgtgtcttgatcctcatggcttttttggctgcatgtgctttgcatctcgtcctggatcttctcccaaaactcgaacgttcagccgctaggccctcaggcgaaccaggttgtagctgtgctcaaccagccgccgaagccgccgcacccggatgggctcaagctagaggacaccccgggggggaattggaagctgcagctagtgctgccggggatgcaggctggcccaacaagcacacactccgcatactgcaagatttctcttcagacccatcctccaatttgaccagccatagcttggagaagctgccccctgccgcagaggctgctgaaggcgcccctcctggacaggatcctggcgtaagaaggcctcctgatcccgcacatcgtcccctcccaagggacccagggccccgcggacccgtactgcccccagggctctcaggggatggatcccttttgacacgtctcttccagcaccctctgtaccaggtgccaattccaccactgactgagggcgatgtcctttttaacgtcaatagtgatatacgctttaatccaaaggctgccaccgcagaaaaccccgattggccacacgagggccctgaggacgaatttctgcctaccggagaagctgctgtggatagttatcccaattggttgaagtttcacatagggataaacagatacgagctgtactcccgccacaaccccgccgttggtgctttgctgcaagacttggggacccaaaaaatcacaagtgtcgcaatgaaatctggtggcactcagcttaagctcattatgacatttcaaaattacgggcaggctctcttcaagcccatgaaacagactcgtgaacaggaaacccctcctgacttcttttatttttcagattacgagcgtcacaatgcagaaatcgcagcatttcaccttgacaggattctggactttcgccgtgtacctcccgtcgcaggaagactcgtcaacatgaccaaggaaatcagagacgtgacaagagataaaaagctttggagaactttttttatcagtcccgcaaacaacgtctgcttttacggtgagtgcagctactactgcagtaccgagcacgctttgtgcggcaaacccgaccagatcgaagggagccttgctgcctttcttccagatctggctctcgcaaaaagaaagacctggaggaatccttggcgtcgttcttatcacaaaagaaaaaaagctgagtgggaggttgaccccgactattgcgaagaggtacgtcagacccctccatatgatagttcacatcgcctcttggacgttatggacatgacaatctttgatttcctgatgggaaacatggatcgccatcattatgagacctttgaaaaatttgggaacgaaacctttataatacacctggacaatgggcgtgggtttggcaaacactctcacgatgagctttcaatcctcgtacctctccagcagtgttgccgcatccgtaggtctacatacctcaggctccaacttcttgcccaagaagaacatcgtttgtcactgcttatggccgaggccctgcgtgctgaccgcgttgctcccgtgctgtttcaaccacatcttgaagctctcgatagacgcctcagaatcgtccttcgtgcagtaggtgactgtgtcgagaaggacggactccatagcgttgttgaggatgacctcggaccagaacaccgcgctgccgctggaagg

SEQ ID NO: 878 - DNA, 1758 bp, synthetic construct
  source 1..1758: mol_type = other DNA
atgaaaatgattttggtcagaagatttcgcgtacttatactgatggctttcctggcagcttgcgctttgcatctcgttttggatctgctgccaaagctggaacgttccgccgccagaccttctggtgaaccaggctgctcttgcgcacaaccagcagctgaagccgcagcacctggctgggcacaagcaaggggccaccctggcggagaattggaggcagcagcctcagctgccggcgacgctggctggccaaataaacatacattgagaatactccaagacttcagcagcgaccccagcagcaacctcacaagtcacagcctcgaaaaattgccaccagccgctgaggccgccgaaggcgcaccacctggacaagacccaggggtcagaaggccacccgaccccgcacatcgccccctccctagggatcccggccctagaggcccagttttgcctcccggattgtcaggtgatggtagcttgcttactaggttgttccagcatcccctgtaccaggtcccaatacctccattgacagagggggacgtgctcttcaatgtaaactctgacattcgcttcaatcctaaggcagccacagctgagaaccccgactggccacatgaaggtccagaggacgagtttcttccaaccggcgaggctgccgtagattcttaccccaattggcttaaattccacataggtattaacagatacgagctttacagtaggcacaaccctgccgttggagcattgctgcaagatcttgggacccagaagataactagcgttgccatgaagagcggcggaactcagcttaaattgatcatgacatttcaaaattacggacaggcattgttcaagcccatgaaacagacaagggaacaagagacaccacccgactttttttacttctctgattatgagcgccataatgcagaaatagccgcctttcacttggaccgtattttggactttagacgcgtcccaccagtcgctggccgtctggtcaatatgacaaaggagatacgcgatgtgacaagagacaagaagttgtggagaaccttctttatatccccagctaataacgtgtgtttttatggggagtgctcatactactgtagcactgagcatgctctttgcgggaagccagatcaaatagagggcagtctcgcagccttcttgcctgatttggcactggctaagcgtaaaacctggcgcaacccttggcgccgcagctatcacaagcgcaagaaagctgaatgggaagtagatccagactactgcgaggaagtccgccaaaccccaccttacgacagctcccatcgtctgctcgacgtaatggatatgactatttttgactttcttatgggcaatatggacagacaccattacgaaactttcgaaaagttcggtaatgaaacatttatcatccatttggacaatggtcgcggcttcggaaagcacagccacgacgaattgtcaatcctcgtgcctcttcagcaatgttgtagaatacgtaggtctacttacctcaggctgcaacttctcgcccaggaggaacaccgtttgtccttgctgatggccgaagcacttagagctgaccgtgttgctccagtcttgttccaaccacatcttgaagcactggatcgccgcttgcgtatagtactccgcgcagtaggggactgcgtagagaaggatggtcttcactctgtggtggaagatgacctgggacccgaacatagggctgcagcaggccgc

SEQ ID NO: 879 - DNA, 1758 bp, synthetic construct
  source 1..1758: mol_type = other DNA
atgaagatgattctcgtaaggcgctttagggttttgatactcatggcatttctcgccgcctgtgctcttcacttggtcttggatctccttccaaaactcgaaagatccgcagcacgccccagcggagagcccgggtgttcatgtgcacagcccgcagctgaagccgccgctcccggctgggcacaagcaagagggcatcccgggggcgaactggaggccgctgcctctgctgctggggacgctggatggcccaataagcacactttgaggatcctccaggacttttccagtgaccccagtagtaatctcactagccactccctggagaaattgccccccgccgccgaagccgccgagggggcacccccaggacaggatcctggagtaaggcgtccacctgatcctgcccatcgtcccttgccacgtgaccccgggccacgcggacccgtcctgccccccggactgagcggggacggaagtctgttgaccagacttttccagcatccactctatcaagtaccaattccccctctgactgagggtgatgttttgtttaacgtcaattcagatattcgctttaatccaaaggccgcaaccgctgagaatccagattggccccatgaagggcctgaggacgaattcttgcccactggcgaggcagctgtagattcttacccaaactggcttaagtttcacattggaataaaccgttacgagctctattccagacataaccctgcagtaggcgcacttcttcaggatctggggacacaaaaaattacttcagttgccatgaaaagcggaggcacacaacttaaactgattatgacattccaaaattacgggcaagcactgtttaagcccatgaagcaaactagagagcaggaaacaccaccagactttttttatttttcagactatgagagacataatgcagagatcgctgcatttcatctggaccgtatactggactttcgccgcgtgccacccgttgctggtcgtctggtaaacatgactaaggaaatccgtgatgtaaccagggacaagaagctgtggcgtaccttttttatcagtcccgcaaacaacgtttgtttctatggagaatgctcatactattgtagtacagagcatgcactgtgtggcaagcccgatcaaattgaaggctctctcgcagcctttctgcctgatttggcattggcaaaaagaaagacttggaggaacccctggaggagaagttaccataaacgcaaaaaggctgagtgggaggttgatcccgactattgtgaggaagtccgccaaactcccccatacgacagtagtcataggctcctcgatgtcatggacatgactatctttgatttcctgatggggaatatggacaggcaccattacgagactttcgagaaatttgggaacgaaacattcatcatacatctcgataacggtagaggtttcggtaaacactcccacgacgagctctctatcctcgtaccccttcaacaatgttgtcgtatccgtcgcagcacttatttgaggctccagctgctggcacaagaggaacaccgcttgtctctgctgatggctgaggccttgcgcgcagatagggtggctccagtacttttccagccacatttggaagctctggataggagactgcgcatagtccttagagctgtaggcgattgcgtagaaaaagatggacttcattccgtagtagaagacgaccttggtcctgagcaccgtgctgctgcagggcgt

SEQ ID NO: 880 - DNA, 1758 bp, synthetic construct
  source 1..1758: mol_type = other DNA
atgaagatgatactggttagacgctttagagttctcattctcatggccttcctggctgcctgcgcactccacctcgttttggacctgctccccaagcttgaacgctctgctgccagaccttctggggaacctgggtgttcatgtgcacagcctgcagctgaagctgccgccccaggttgggcccaagctcgcggccacccaggaggcgaactggaagccgctgcatctgcagcaggggatgccggatggcccaataagcataccctgagaattctccaggattttagtagcgatccatctagcaatttgacttctcatagtcttgagaagttgccaccagctgctgaggctgctgagggagcaccacctggccaagatccaggtgtacgcagacctcccgaccctgcacacagacccctgccaagagatcccgggcccagaggtcctgtcttgccaccaggtctctcaggagacggaagcctgcttactcgtctgtttcagcaccccctctatcaagtgcccatcccaccattgacagaaggggacgtgttgtttaacgtcaattctgacatccgtttcaaccccaaggccgcaaccgccgaaaatccagactggcctcatgaggggcccgaggacgaattcctgcccaccggagaagcagcagttgactcttatccaaattggctgaagttccacatcgggataaaccgttacgagttgtatagccgtcataatcccgcagtaggggctctcctccaagatcttggaacacaaaaaattaccagtgtagccatgaaatctggtggaactcaactgaagctgataatgaccttccaaaattatggccaggccttgtttaaacctatgaaacaaactagggagcaggagactccccctgatttcttttacttcagtgactatgaaaggcataatgctgaaatcgccgcttttcatttggacaggatattggactttaggcgtgtgcctcctgtggccggtcgcttggttaacatgactaaagagattcgtgatgttactcgcgacaaaaagctctggcgtactttcttcatctctccagcaaataatgtttgtttttacggcgaatgcagctattattgttccactgaacatgctttgtgtggtaaaccagaccagatcgaaggatctttggcagcctttctcccagaccttgcattggcaaaaaggaaaacctggcgtaatccctggcgtcgctcataccacaaaaggaaaaaggccgagtgggaagttgacccagactactgtgaggaagttcgtcagaccccaccttacgacagtagccataggctgttggacgttatggacatgactattttcgacttcttgatgggaaatatggatcgccaccactacgagactttcgagaagttcggcaacgagacctttataatccacctggataatgggcgcgggtttggtaagcattcccatgacgaactttcaattctcgtgcctctgcaacaatgttgccgtatcaggagaagcacatatctccgtttgcaacttctggcccaagaggaacatcgtttgagtcttctcatggctgaggccctcagggccgaccgcgttgctcctgtgctgtttcaaccacatctcgaagcccttgataggcgcttgaggatcgtgctgcgcgccgtcggggactgcgttgagaaagatggcctgcatagtgtcgtggaggacgacctgggacctgaacaccgtgcagccgcaggcagg

SEQ ID NO: 881 - DNA, 1758 bp, synthetic construct
  source 1..1758: mol_type = other DNA
atgaaaatgatacttgtacgcagattccgtgtcctcattctgatggctttcctcgcagcatgtgctctccatctcgttcttgaccttctgccaaaactggagcgcagcgcagcaaggccttctggagagcccggttgttcttgtgcccagcctgccgcagaagccgctgccccaggatgggcccaagctagaggtcacccaggtggggagctcgaagctgcagctagcgcagccggagatgccggatggccaaacaaacataccctgcgtattcttcaggactttagctctgatccctcctccaaccttacttctcactcccttgagaaactgcctccagccgccgaggctgcagaaggcgcacccccaggtcaagatccaggcgttaggcgtccccctgaccccgctcaccgtccactccctagagatcccggccctcgcgggccagtcctcccacctggacttagcggtgacgggagtttgctgaccaggcttttccaacaccccctgtaccaggttccaatcccacccttgacagaaggtgacgttctcttcaatgtaaattccgacataagattcaaccctaaggctgcaaccgccgaaaatcccgactggccccatgaaggtcccgaagacgaatttttgccaaccggagaggctgctgtagattcttatcccaattggttgaagtttcatatagggatcaatagatatgagctctactcacgtcacaaccccgccgttggtgccttgcttcaggacctcggaacccagaaaattacctctgttgctatgaagtcaggaggaactcaactcaagcttatcatgacatttcaaaattacgggcaagcactgtttaagcctatgaagcaaactcgtgagcaggagactccacctgacttcttctatttttcagactacgagagacacaacgcagagatcgcagctttccaccttgatcgtattcttgacttcaggcgcgtcccacccgtggccggacgtctcgtaaacatgactaaggaaatacgcgatgtcactcgtgataagaaactctggaggaccttttttatatcacccgctaacaacgtttgtttttacggtgaatgctcctattattgttctaccgagcatgccctttgcggcaaaccagaccaaatagagggttccttggctgcattccttcctgacctcgccctcgccaaacgtaaaacctggcgtaatccttggaggagaagctaccataaaagaaagaaggctgagtgggaggtcgatcctgactattgtgaggaagttaggcaaacacccccctatgacagtagtcacaggctccttgatgtgatggacatgactatttttgactttctgatgggaaatatggataggcatcattatgaaaccttcgagaaattcgggaacgagacatttatcatccatttggacaatggcagggggtttgggaaacatagtcacgacgaactttccatcttggttcctctgcaacaatgctgtagaattaggcgttctacctatttgcgtctgcagctcctcgcacaagaagaacatcgcctgagtctgctgatggctgaagccttgagagcagatagggtcgcaccagtcctctttcagcctcatttggaagctttggaccgtcgcctgcgcatcgttctccgcgcagttggtgactgcgttgaaaaagatggactgcattctgttgttgaggacgatttggggccagaacaccgtgctgctgcagggcgt

SEQ ID NO: 882 - DNA, 1758 bp, synthetic construct
  source 1..1758: mol_type = other DNA
atgaaaatgattctggtcagacgctttagagttcttatcttgatggctttcttggcagcctgtgccctccatcttgtactggatcttcttccaaagctggaaaggagtgccgcccgtcctagcggggaacccggttgctcatgtgctcagcccgccgccgaagctgcagctcctgggtgggcccaggccaggggccacccaggtggagaattggaggccgcagcctccgccgctggagatgcaggctggccaaataaacatacacttcgcattctccaggacttttcttctgacccttcatccaaccttacctcacattctttggaaaaactccctcctgcagcagaagcagcagaaggggcaccccctggacaagaccctggggtgcgcaggcctcccgaccccgcccataggcctcttccaagagatccaggtcccaggggaccagttttgccccccggactgagtggcgatgggtcccttcttactaggcttttccaacatcccctctaccaagtgcccatcccaccactgaccgaaggtgacgtcctttttaacgtgaacagcgatataaggttcaaccctaaggctgccacagcagagaatccagactggcctcatgagggccctgaagacgaattccttcctacaggggaggcagctgtcgattcctacccaaactggctcaagttccacatcggaatcaataggtatgagttgtattccagacacaatcctgctgtaggcgctctccttcaggatttggggacccaaaaaataacatccgtggcaatgaagtccggaggtacccagctcaagctcataatgacattccaaaactatgggcaagcactctttaaaccaatgaagcagacaagagagcaggagactccacccgacttcttttatttctcagattatgaaagacataatgccgagattgcagcatttcacctggataggattcttgactttaggagggttccccctgtcgccgggaggcttgttaatatgactaaggaaatcagagatgtaacccgtgacaagaagttgtggcgtacattttttatatccccagctaacaacgtgtgtttctacggggaatgttcatattactgtagtactgagcacgccctgtgtggcaagcccgatcagattgaaggcagcctggctgccttccttccagatcttgctctcgcaaaaagaaaaacttggaggaatccttggcgtaggtcttaccataagaggaagaaggcagagtgggaagtcgatcctgattattgtgaagaggtccgccaaacaccaccatacgactcttctcatagattgcttgatgtgatggacatgactatttttgacttcctgatgggcaatatggataggcaccactatgaaacattcgaaaaattcggcaatgagacttttattattcatctggacaatggtcgtgggttcggcaagcattcccatgacgaactgtctatattggttccccttcagcagtgctgtcgcatacgtagatccacatacttgagattgcaacttctggctcaagaggaacacaggctctcccttttgatggccgaagcccttagagctgatagagttgctcccgttctttttcagccccacctcgaggccctcgatcgcaggctgaggatagtgcttagggccgtaggtgactgtgttgagaaagatgggttgcatagcgtcgtggaagatgatctgggccccgagcatcgtgctgcagcaggcaga

SEQ ID NO: 883 - DNA, 1758 bp, synthetic construct
  source 1..1758: mol_type = other DNA
atgaagatgatcctcgtccgcagattcagggttcttatactgatggccttcctcgctgcatgcgccctgcatctggtgttggacctcctcccaaagctggagcgctccgctgccagaccttccggcgagcccggttgttcctgtgcacagccagctgctgaagccgccgctccaggctgggctcaggcaagagggcacccaggaggagaactcgaagcagctgcctcagctgctggagacgccggatggcctaataagcataccctgagaattctgcaagacttctcctctgacccctcaagcaatcttacttctcacagtcttgaaaagctccctcctgctgctgaagcagcagagggcgccccacctgggcaggaccccggcgtgaggaggccacctgacccagcacaccgccccctcccaagagacccaggccctcgtggaccagtcctgccccccggtctctcaggagatggttcactccttacccgcctttttcaacatccactgtatcaggtgcctattccccctctgacagagggagacgttctctttaacgtcaactcagatattcgtttcaaccctaaggctgccactgctgagaatccagactggcctcatgaggggcccgaagatgagttcctgccaaccggagaggcagcagtggattcttaccccaattggcttaaattccatataggaataaataggtacgaactttatagccgccataatcctgccgttggggcattgcttcaagacctcggcacccaaaagatcacttccgtcgctatgaaatccggcggcacccaattgaaactcattatgacattccaaaattacgggcaggcattgtttaagcctatgaagcaaaccagggagcaggagacaccccctgatttcttttacttctctgattatgagaggcacaacgctgaaatagccgctttccacctcgaccgcatccttgatttcaggcgcgttccccctgtggccggcagactggtcaatatgacaaaggagatccgtgatgtgacccgtgacaaaaagctttggagaactttttttatttcacctgccaataatgtatgtttctatggcgaatgctcttactactgttcaactgaacacgccctgtgcgggaagcctgatcaaatagagggtagtctggcagctttcctccccgacctcgcactggcaaagagaaaaacctggaggaatccctggcgcagatcatatcataaaaggaagaaagctgagtgggaagtcgacccagactactgcgaagaagtacgtcagacaccaccatatgatagcagtcaccgtttgctggacgttatggatatgacaatctttgattttctgatgggcaacatggaccgtcatcactacgaaacattcgagaaatttggaaatgagactttcataatacaccttgataacggtagagggtttggcaagcacagtcacgatgaactgtctattctcgttcccctccaacagtgctgcaggatcaggaggtctacttatcttcgcctccagctgcttgctcaggaagaacatcgtttgtctcttctgatggccgaagctctcagagccgatcgcgttgcacccgtgctgtttcaaccacacttggaagcacttgatagacgtttgaggattgtactgcgtgccgttggcgattgcgtagagaaggatgggctccacagtgtcgtggaagacgatttgggacccgagcatagggctgcagctggcagg

SEQ ID NO: 884 - DNA, 1758 bp, synthetic construct
  source 1..1758: mol_type = other DNA
atgaaaatgatacttgtgagacgttttcgtgtcctcatcttgatggcttttctggctgcatgtgctctccatctcgtgctggacctcctcccaaaactcgaacgttctgccgcaaggccatccggagagccagggtgtagttgcgcccaacccgcagccgaggcagctgctcctggatgggcacaggcccgtggacaccctggtggcgagttggaggcagcagcttctgcagctggtgatgcaggttggccaaacaaacatacactgcgtatactccaagactttagttctgatccatcatcaaatctgaccagccattctttggagaagttgcctcccgccgctgaagctgcagagggtgcaccaccaggacaagaccctggggtgaggcgcccaccagatcccgcacatcgtccactcccccgtgacccaggaccacgcggccctgtactcccccctggactcagcggcgacgggtctcttcttactaggttgttccagcaccccctgtaccaggtacctatacccccacttactgaaggggacgtcctcttcaatgtgaattcagatatacgtttcaatccaaaagcagcaactgctgagaatccagattggcctcacgaaggtcccgaagatgagtttttgccaacaggtgaggctgcagttgatagctatcctaactggctgaagtttcatataggaatcaacagatatgaattgtattcaagacacaaccctgctgttggagctcttcttcaagatctcgggacccagaagataacttccgtggctatgaagtccggcggaacccaacttaaactcatcatgactttccaaaactacggccaagccctttttaaacccatgaaacagacaagagagcaagagactccccctgacttcttctattttagcgactatgagaggcataacgctgaaattgccgcatttcaccttgataggatccttgatttccgtcgcgtgccacccgtggcaggtcgtttggtgaacatgaccaaggaaataagggatgttacaagagataaaaagctgtggcgtactttttttatcagtccagctaataacgtgtgcttctatggggagtgctcctattattgctctaccgagcatgccttgtgtggcaaacccgatcagatagagggtagtcttgccgcctttctccctgatttggcattggctaaaaggaagacttggcgtaacccatggaggcgcagttatcataagagaaaaaaggccgaatgggaagttgacccagattactgcgaagaggtgcgtcaaactccaccttacgacagttctcatcgtcttttggatgtgatggatatgaccatcttcgactttctgatgggtaatatggatcgccaccattacgagacttttgaaaagtttggtaatgagaccttcatcatccacttggataacggtcgtggtttcggtaagcattcacatgatgaattgagtattttggttccattgcaacaatgttgcagaatccgtaggagcacatatctgaggcttcaacttttggcccaagaggaacatagactgtctcttcttatggctgaagctttgcgcgcagatagagtagcaccagtattgtttcaaccacatttggaggctttggatcgcaggcttcgtatagttcttagggccgttggtgattgtgtggaaaaagacggacttcattccgtagtggaagatgatctgggccccgagcaccgcgctgcagcagggaga

SEQ ID NO: 885 - DNA, 1758 bp, synthetic construct
  source 1..1758: mol_type = other DNA
atgaagatgattctggtcagaagatttagggttcttattctcatggcatttctcgctgcctgtgctcttcacctggtcctcgacctgcttcccaagctcgaaagatccgctgcccgcccatctggcgaaccaggctgtagctgtgcccaacccgccgcagaagccgcagctccaggatgggcccaggctaggggccacccaggcggtgaattggaggccgcagcctccgccgcaggagatgccggttggccaaataaacacactctccgcattctccaggacttctcctcagatccttctagcaatctgacatctcattctctggaaaagttgccacctgccgctgaggccgccgaaggggcacctcctggccaagaccctggggtaaggaggcccccagatccagcacataggcctcttcccagagacccaggtcccagggggccagttctccctcccggattgagtggagatggttcccttttgaccagactgttccaacatcctctctatcaggtccctattccaccactgactgaaggagatgtgctgttcaacgttaatagtgacatcagattcaaccccaaggctgccacagccgagaatccagactggccccacgagggacccgaagatgaattccttcctaccggagaagctgcagtcgattcctatcctaactggttgaaatttcacatcggtataaaccgttatgaactgtattcaagacacaatcctgccgtaggcgccttgcttcaggatttggggacccaaaaaatcactagtgtggcaatgaaaagcggcggaactcaactcaaattgataatgacattccaaaattatgggcaagcattgtttaaacctatgaaacaaacacgtgagcaggagaccccccctgactttttttacttttccgactatgaacgtcataatgctgagatcgctgcttttcaccttgatagaatactcgattttcgccgcgttccacctgtggccggccgtctggttaatatgactaaggagatcagggacgtcacccgcgataaaaagttgtggcgtaccttctttatctcacctgccaataatgtatgcttctacggcgaatgctcttattattgcagtacagagcatgcactgtgtgggaaaccagatcagatcgaaggctctctcgcagcctttttgccagacctcgcccttgctaagcgtaagacatggaggaacccctggcgccgcagctaccacaaaaggaagaaagctgaatgggaggttgatccagattactgcgaagaagtacgtcaaacccccccatatgatagttctcaccgtttgcttgacgtcatggatatgactatcttcgacttcctgatgggtaatatggataggcatcattacgaaacttttgagaaatttggaaatgaaaccttcataatacatttggacaacgggcgcggtttcggaaaacacagccacgacgagctttcaatattggttcctcttcagcaatgttgtaggattagacgcagtacttatctcaggctgcaactcctcgcacaagaggagcatcgcctgtcattgcttatggccgaagctctcagggccgaccgtgtggcaccagtgctgtttcaacctcacctggaggctcttgacagacgccttaggattgtgcttcgtgctgttggggattgcgtggagaaagatggtcttcattctgtggtagaggatgaccttggccctgaacacagagctgctgctggtcgt

SEQ ID NO: 886 - DNA, 1758 bp, synthetic construct
  source 1..1758: mol_type = other DNA
atgaaaatgatattggttaggcgttttagggttctcattctcatggcatttttggccgcatgcgctctgcacctcgtactggatctgttgcctaaattggaaaggtctgccgctaggccttcaggtgagcctggttgctcatgcgcacagcccgctgctgaagccgctgcccccggttgggctcaagcccgtggacatcctggcggagagctcgaagctgcagcatccgccgccggtgacgcaggatggcccaacaaacacactctcaggattcttcaggacttttctagtgacccctctagtaacctcacatcccactctctcgaaaagttgcctccagcagctgaagcagccgaaggtgcacctcccgggcaggatcctggtgtgaggcgcccccccgatcctgcacacagaccacttccaagagacccaggacctcgtggtcccgttttgccacccggcctctccggggacgggagccttctgactcgcttgtttcaacatcctttgtatcaagtccccataccacctctcaccgaaggggacgtgttgttcaatgttaattccgacatacgctttaatcccaaagccgctaccgccgaaaatcctgattggcctcatgaggggcctgaagatgaatttcttccaacaggggaagctgctgtagactcctacccaaattggcttaagttccatatcgggatcaatcgttatgagctgtattccaggcataacccagccgtaggtgcacttctgcaagacctcggaacccagaaaattaccagcgtcgccatgaaaagtggagggacacagttgaagcttattatgacatttcaaaattacggtcaggcactgttcaagcccatgaagcagactcgtgagcaagaaaccccacccgacttcttctacttcagcgactacgagaggcacaatgcagagattgcagcatttcatctggaccgcatactcgacttccgtcgtgtccctcccgttgctggtaggctcgttaatatgaccaaagaaatccgtgacgtaacaagggataagaaactttggcgtacattcttcatatcccccgctaataacgtctgtttctatggagaatgctcatattactgttctactgaacatgctctctgtggtaagccagaccagatcgaggggagtctcgctgcctttctcccagatctcgctctggcaaagagaaaaacctggaggaatccatggaggcgtagctaccataaacgcaaaaaggcagaatgggaagtggaccctgattattgcgaagaggtcagacaaactcctccttacgactcatcccacagactgctcgatgttatggatatgaccatattcgatttcctgatggggaacatggatcgccaccactatgagacattcgagaagttcggtaatgagacttttatcatccacctggataatggtcgcggcttcggaaaacattctcatgatgagctttctatccttgttccactgcaacaatgttgcagaatccgccgctcaacatatctgcgcctgcaacttctcgcccaagaagaacaccgtctctctttgctcatggcagaggctttgcgcgccgatcgcgtcgcacccgttctttttcaaccccacttggaagccctcgatcgcaggctgagaatcgtcctccgcgccgtcggggactgtgtcgaaaaagacggattgcattcagttgttgaagatgatttgggccccgagcatcgtgctgcagcaggcagg

SEQ ID NO: 887 - DNA, 1758 bp, synthetic construct
  source 1..1758: mol_type = other DNA
atgaagatgatccttgtacgtaggttcagggtcctgatacttatggcattcctggccgcctgtgctctgcatctcgtgctggaccttctgcctaaattggaacgctcagccgctaggccttcaggggaacctggctgttcctgcgcacaacccgctgcagaggcagctgctccaggatgggctcaagctcgcggacacccaggtggtgagttggaagcagcagcatcagctgcaggggatgccggatggcctaacaagcatacacttcgtattttgcaagatttttcttccgatccttctagcaatctcaccagtcactccctggaaaagcttccccccgccgctgaagctgctgagggggctcccccaggccaggatcctggagtgaggcgccccccagacccagcacatagaccattgccaagggatcctggcccaaggggccctgttcttccaccaggtctctctggcgacggttccctcttgacacgcttgtttcaacatcctctctaccaggtcccaatccccccattgaccgaaggcgacgtattgtttaatgtgaactctgatatacgtttcaaccccaaggccgcaaccgcagaaaatcctgactggcctcacgagggacccgaggatgagtttctgcctacaggagaggccgccgtggatagctaccccaattggctgaagttccacatcggcattaataggtatgagctgtacagtcgccataacccagcagtcggggccctcctgcaagacctcggcacacaaaaaatcactagcgttgccatgaaaagtggtggaacccagcttaagctcattatgacattccaaaattatggtcaggctctgtttaaacccatgaagcagactcgtgaacaggagacacctcctgacttcttttacttttctgattatgaacgtcacaatgcagaaatagcagccttccatctggacagaatactcgacttccgtcgtgtgccccctgtggctggcagacttgttaacatgaccaaggagatcagagatgtaactcgcgacaaaaagctttggagaactttctttatcagtcctgcaaacaacgtctgtttttatggggagtgctcatactactgtagtactgagcacgcactgtgcgggaaacccgaccaaatagagggttcccttgcagctttcctcccagacctggcacttgccaagcgcaagacatggagaaacccatggcgcagatcataccacaagaggaagaaagctgaatgggaagtcgaccccgactattgtgaagaagtaaggcaaactcctccttatgattcttctcataggttgctcgacgttatggatatgactatattcgatttcctcatgggtaacatggaccgccatcattacgagacctttgagaagtttgggaacgagactttcataattcatctcgacaatgggagaggattcggaaaacattcacatgacgagctctcaattcttgttccactccagcaatgttgccgcattcgcagatctacttacctgaggcttcagctcctggcccaagaagagcaccgtttgtcactcttgatggcagaagccctccgtgcagaccgtgtcgctccagtactgtttcagcctcaccttgaagcactggacagaagactgaggatagttttgcgcgcagttggggactgcgtagaaaaggatgggttgcattctgtagtcgaagatgaccttggtcccgaacatcgcgctgccgctggccgc

SEQ ID NO: 888 - DNA, 1758 bp, synthetic construct
  source 1..1758: mol_type = other DNA
atgaagatgatattggtacgtagatttcgtgtactgatcttgatggctttcctcgccgcctgtgcattgcacctcgtactggacttgcttccaaagctcgagaggtcagctgccaggccaagtggcgaacctggctgctcctgcgcacagcccgcagccgaagctgcagctcccggatgggcccaagcccgcggacaccctgggggggaactggaggcagctgctagcgctgctggtgacgcaggatggccaaataagcacacactcagaatcctccaggacttttccagcgatcccagctccaacctgacatctcattctttggagaagcttcccccagctgctgaggccgctgagggggctccccctgggcaggatcctggcgtacgtagacccccagatccagcccatcgcccacttcccagagatcctgggccaagaggccccgtcctcccaccagggctgagtggtgacggcagtcttctcacaaggttgtttcaacacccattgtaccaagtccccattcccccactgaccgaaggagatgtattgttcaatgtgaatagtgacattaggtttaaccctaaggccgctactgccgaaaatcccgattggccacacgaggggcccgaagacgagttcctcccaacaggagaagccgccgttgatagttaccctaattggctcaaatttcatataggtataaataggtatgaactttacagtaggcacaaccccgcagtgggtgcactgctccaggatctgggaacccaaaaaataacaagcgttgcaatgaaaagcggcgggacacaattgaaattgattatgacatttcaaaattacggccaggctctgttcaaaccaatgaaacaaactcgcgagcaggagacacctccagatttcttctacttctctgactacgaaagacacaacgcagaaattgctgcttttcacctcgaccgcattttggattttcgcagggttccccctgtcgcagggcgcttggtaaatatgactaaggagatcagggacgttaccagagacaaaaaactctggcgtacatttttcatctcccccgctaataacgtctgcttttatggtgaatgctcttactattgctcaactgaacacgcactttgtgggaaaccagatcaaatagaaggtagtctcgcagcattcctgcctgaccttgcactcgctaaacgcaaaacatggaggaacccttggagacgcagctatcacaagagaaagaaggcagaatgggaagtggatccagattattgcgaagaagttagacaaactccaccctatgattcctctcatcgcctgctcgacgtcatggatatgactatcttcgatttccttatgggcaatatggatagacaccattatgagaccttcgaaaagtttgggaatgagacattcattattcacttggataatggacgtgggttcggtaaacacagccatgatgagttgtcaatacttgtccccctccagcagtgctgccgcattaggcgcagcacatacttgcgccttcagcttctggcacaagaggaacacaggttgtctcttcttatggcagaagccctcagggccgatagggttgctccagtcttgttccaacctcatctcgaggccctcgatcgccgccttagaattgttttgcgtgccgtaggagattgtgtggagaaggatgggctccattctgtagtagaggatgacctgggtcctgaacacagggctgctgcagggcgt

SEQ ID NO: 889 - DNA, 1758 bp, synthetic construct
  source 1..1758: mol_type = other DNA
atgaagatgatactggtcagacgcttccgtgtcctgatccttatggcatttttggctgcttgcgctctgcatctcgtattggatcttctgcccaagctggagagatctgctgcccgcccttcaggagagccagggtgttcctgcgcacagcctgcagcagaagcagcagcacctggatgggctcaagcccgcgggcatcccggtggggagcttgaggctgctgcctccgcagcaggtgacgctgggtggcctaacaaacacaccttgcgtatcctgcaggacttttcatctgacccatcctctaatctgaccagtcactctttggagaagcttcctcccgcagccgaagcagccgagggtgcacctcctggtcaagatcccggcgtaaggaggccacccgacccagctcatcgtccattgccacgtgatcctggcccaagagggcccgtactgccacctggtcttagcggagacgggtcactcctcacaagactcttccaacaccctctgtatcaggttccaataccccctctgacagagggggacgtcctttttaacgtgaacagcgacattcgtttcaatcccaaagctgctacagctgaaaatcccgattggcctcatgagggccctgaggatgagtttttgcccaccggcgaggccgctgtcgattcctaccccaactggctgaaattccacattggcataaacagatacgaactttacagcagacataaccccgcagtaggggcccttttgcaagacctgggtacacaaaagataacatccgtcgccatgaaaagcggtggtacccagcttaagctcattatgacattccagaactatgggcaagccctctttaaacctatgaagcaaaccagggaacaggaaactccacccgacttcttttacttttccgactatgagcgccacaacgccgaaattgccgcattccacctggatagaatcctggatttccgtcgcgtccctcctgtagctggccgccttgtaaatatgacaaaagagattagggacgtgacacgtgataaaaagctctggaggaccttctttatctccccagccaataacgtgtgcttctacggtgaatgtagctattactgttctactgaacatgccctgtgtggaaaacctgatcagattgaggggtcactcgcagccttcctccccgatctcgcactggcaaagagaaaaacctggcgcaacccttggaggagatcctaccataaacgtaaaaaggctgagtgggaagttgacccagattattgtgaagaggtcaggcaaacacctccctacgatagctcccacaggttgctggatgtaatggatatgactatatttgattttcttatggggaatatggaccgccatcactatgagacctttgaaaagttcgggaatgagaccttcataatacatcttgacaacgggcgtggttttggcaagcactctcacgatgaacttagcatcctcgtccctctgcagcagtgttgtagaattcgtcgttccacttatctcaggttgcaattgcttgcacaagaagaacaccgtcttagtctgctcatggcagaagcattgcgcgcagatagagtcgcaccagttctctttcagccacacctggaggctctggacaggagacttcgcatcgttctgcgcgcagttggcgactgcgtggagaaggacgggctgcatagtgtcgttgaagatgatcttggaccagagcatcgtgctgccgccggtaga

SEQ ID NO: 890 - DNA, 1758 bp, synthetic construct
  source 1..1758: mol_type = other DNA
atgaaaatgatactggtgagaagatttagagttttgattttgatggcttttcttgctgcttgcgccctgcatctggttctggacctcctgccaaagttggaacgctccgccgccagaccaagtggtgaacctgggtgtagttgtgctcagcctgccgccgaagctgccgcccctgggtgggcacaagcaagaggtcaccccggcggtgagttggaggccgccgcatcagctgcaggtgacgcaggttggcctaacaaacacacccttagaatactgcaggatttttcatctgatccctcatcaaatctgacttcacacagcctggagaaactccctcccgctgcagaggcagctgaaggggctcccccaggtcaggacccaggggtaagaaggccccccgatccagctcaccgtccccttccacgtgacccaggtccccgcgggccagttctgccccctgggttgtccggcgacggtagtcttcttactcgcctcttccaacaccccttgtatcaagtgcctattccaccccttactgaaggcgacgttctgtttaacgtaaacagtgatatacgctttaatcctaaggcagctaccgccgagaatcctgattggccccatgaagggcccgaagacgaatttcttcctaccggtgaggccgccgtggatagttacccaaactggctgaaatttcacattggtatcaaccgttatgaattgtatagtagacataaccctgcagtaggggccttgcttcaagacctgggtacccaaaaaatcacctctgtggccatgaaatccggagggacacagctgaagttgataatgacttttcaaaactacgggcaagccttgttcaaacctatgaagcagactagggagcaagaaacacctcctgacttcttctatttttcagattacgaaagacacaacgccgaaattgcagctttccatctcgaccgcattctcgacttcaggcgtgtcccccccgtcgctggcagactggttaacatgacaaaagagatcagagacgttacccgcgataagaagttgtggaggacattttttatttcaccagccaacaatgtttgtttttacggagaatgttcatattactgcagcactgaacatgccctctgtggcaagccagaccaaatcgagggttcactcgctgccttcctgcccgacttggcacttgctaaacgcaagacctggcgcaatccatggcgtagatcttaccataagcgtaaaaaagctgagtgggaggtagatcctgattattgtgaggaagtacgtcagacacccccctatgactcatcccatagactgctcgacgttatggacatgacaatattcgattttttgatgggaaacatggaccgccatcactacgagacatttgaaaagtttggtaacgaaaccttcataatacatctcgataatggtaggggcttcggaaagcattctcatgacgaattgtccatccttgtccctctgcaacagtgctgtagaatacgccgttccacctacctccgccttcaattgttggcacaagaagagcatagactttctctgcttatggccgaagcacttcgcgcagatcgtgtggctccagtcctcttccagccacatttggaggctctggataggcgtttgcgcattgttttgcgtgctgtgggggactgcgtggaaaaggacggtctccactctgttgttgaggatgatcttggccccgagcaccgtgcagccgccgggcgt

SEQ ID NO: 891 - DNA, 1758 bp, synthetic construct
  source 1..1758: mol_type = other DNA
atgaaaatgattttggtacgccgttttcgcgtcctgatattgatggcctttttggccgcctgcgctctgcacctcgtgctcgatctgcttccaaaacttgaaagaagcgcagcaaggcccagcggcgaaccaggttgttcttgcgcccaaccagctgctgaggcagccgctcctggctgggctcaggccagaggtcatcccgggggtgaacttgaggctgctgcctctgccgcaggtgatgctgggtggccaaacaagcatactctcaggatattgcaggatttctcaagcgatccctccagtaatttgacatcacactctcttgaaaagcttccccccgctgccgaagctgctgaaggtgccccacctggacaagaccccggggtgaggaggccaccagatccagcccaccgccctctgcctagagatccaggtcctcgtggcccagtccttccacccggcctctctggagatggatcactgcttacccgtctgtttcaacaccccctgtaccaagtaccaattcccccactcaccgaaggtgatgtgctgtttaacgtaaactccgacatcagattcaaccctaaagctgcaacagccgagaaccccgactggccccacgaaggccccgaggacgagttccttccaaccggggaagctgcagtggattcttatccaaattggttgaagtttcacatagggatcaaccgttacgagctctactccaggcacaaccccgcagttggggcccttttgcaagatcttggcacacagaagatcactagtgttgcaatgaaaagtgggggaacacagttgaagttgattatgaccttccaaaattatggtcaagcactttttaaaccaatgaagcaaaccagggaacaggaaacaccccctgattttttctacttctctgactatgagagacataacgcagaaatagctgccttccacttggatcgcattcttgattttcgtcgcgtaccccccgtagccggtcgccttgtcaatatgacaaaggaaataagagacgtgacacgtgacaagaaactctggcgtacttttttcatcagtcctgctaacaatgtatgtttttacggagagtgctcctattattgttctactgaacatgcactctgcggaaagcccgatcaaatagaaggttcccttgctgcctttcttccagaccttgcccttgccaagcgcaaaacatggcgtaacccatggaggcgcagttatcacaagaggaagaaagccgaatgggaggttgaccctgactactgcgaagaagttagacaaacccctccttacgattctagtcatcgcttgttggatgtcatggacatgactatctttgatttcctcatggggaatatggaccgccaccattacgaaacctttgaaaagttcggcaatgagactttcatcatccaccttgacaatggacgcggattcggcaagcactctcacgatgaactttccatactcgtcccacttcagcaatgttgtaggatcagacgcagtacctatctgagacttcagttgctcgcccaggaagagcaccgtcttagtttgcttatggctgaggcactcagagcagacagagttgctccagtcctcttccaaccccacctcgaagcattggatagacgcctgagaatcgtactcagagctgtaggtgattgcgttgagaaagacggcttgcattcagtcgttgaagacgatttgggacctgaacatcgcgcagctgcaggccgc

SEQ ID NO: 892 - DNA, 1758 bp, synthetic construct
  source 1..1758: mol_type = other DNA
atgaaaatgattcttgttaggcgttttagagttctgatattgatggcttttcttgcagcttgcgcactgcatctcgttcttgatctcctgcctaaactcgagcgtagtgccgccaggccttctggtgaacctggctgctcttgtgcacagccagctgccgaggctgcagctcctggttgggcccaggccagagggcatcctgggggcgagttggaagccgctgcttccgctgcaggcgacgctggatggcccaataaacacaccctcaggatcctccaagatttttcttccgatccatcctccaatctcaccagtcattcactcgagaaacttccaccagcagccgaggctgctgagggggctcctcctggtcaagaccccggcgtaagacgccctcccgatccagctcaccgccctcttccaagagatcctggacccagagggccagtgcttccaccaggcttgtcaggggatgggagcttgctgacccgtctgttccagcatcccctctatcaagttcccattcctcctcttactgaaggcgatgttctctttaacgtaaatagcgatattaggtttaatcccaaagcagcaactgctgaaaaccccgactggccccatgagggccctgaagacgagttcttgcctaccggagaggctgctgtggatagttaccccaattggctgaagttccatatagggataaacagatatgaactttattctcgtcacaatccagcagtgggcgcacttttgcaggatcttggaacccaaaagatcacctcagtcgctatgaaaagcggaggaacccaactcaaattgattatgaccttccagaattatgggcaagcactttttaagcccatgaaacagacccgcgaacaggaaacaccacccgatttcttctatttctcagactacgagagacataatgctgagattgctgccttccatcttgataggatattggattttaggcgtgtcccccccgtggctggcaggctcgtcaatatgactaaagagatacgcgacgtgaccagggacaagaaactttggagaacattcttcattagccccgctaacaacgtatgtttctatggtgaatgctcatattactgtagtaccgagcacgccctttgtgggaagccagatcagattgaaggatccctggcagcattcctgcccgaccttgccctggctaaaagaaaaacatggaggaatccatggaggcgttcctaccacaagcgtaagaaagctgaatgggaagtcgaccccgactactgtgaggaggtgagacagaccccaccctatgactcttcccatcgtttgcttgatgtaatggacatgaccatcttcgactttttgatgggcaacatggatcgtcaccactacgagacattcgaaaagtttggcaatgaaacatttattatacatctggataatggaagggggttcgggaagcattcacatgatgaattgagtatacttgttccattgcaacaatgttgccgtatccgcagatcaacttatctgaggcttcagcttttggcacaggaagagcatcgtcttagccttttgatggcagaggctcttagagctgatcgcgtagcacccgtcctcttccagcctcacttggaggctctcgaccgtcgtttgagaattgttttgagggccgtgggagactgtgtcgagaaggacggactccactctgttgtagaagacgatttgggtcctgagcatagagcagccgctggccgc

SEQ ID NO: 893 - DNA, 1758 bp, synthetic construct
  source 1..1758: mol_type = other DNA
atgaagatgatacttgtccgtagattccgtgtccttatcctgatggcatttttggctgcttgcgccttgcacttggtactcgacttgctcccaaagctggagagaagcgctgcacgcccttcaggcgagcccggatgtagttgtgcccagcccgcagcagaggctgccgcacctggttgggctcaagccaggggtcatcctggcggggagttggaggcagccgcttctgctgcaggcgatgctggttggccaaacaaacacactctgagaattctgcaagacttttcaagtgatccatctagcaatttgacttcccacagcctcgagaagctgcctccagctgctgaggcagcagagggtgcacctcccggccaagaccccggggtacgcaggccccctgaccctgcccacaggcccctgcctagagatcccggtcctagagggccagttctccctcccggactcagcggtgacgggagtcttcttacccgcctgtttcaacaccctttgtatcaagtccccattcctcccctgacagaaggtgacgtgctctttaacgttaacagcgatatcagatttaatcccaaagcagcaaccgctgaaaatcccgattggccacacgaagggccagaagacgaatttttgcctaccggagaggccgctgttgacagttatcctaactggctgaagttccatataggaattaatagatatgagctctatagcagacataatcccgccgttggggcacttcttcaggatcttggaacacaaaaaataacctcagttgcaatgaaaagtggaggtactcaattgaaacttatcatgaccttccaaaattatggccaggcacttttcaaacccatgaagcagaccagggagcaagagaccccaccagactttttttacttctcagactacgagaggcataatgccgagatagcagccttccacttggatcgcatacttgatttcagacgcgttcctcccgttgcaggacgccttgtaaacatgactaaggaaattagggacgttaccagggacaagaagctttggagaactttctttattagtcctgctaacaatgtctgcttttacggggagtgcagttactactgttctacagagcatgcactttgcgggaagcctgatcagatagaagggtcactcgcagcatttctgccagacttggcactcgcaaaaaggaaaacatggcgtaacccttggcgtcgcagctaccataagcgtaagaaagctgaatgggaggtcgatcctgactattgcgaggaggtccgccagacccccccatatgacagcagccacagacttctcgacgtaatggacatgaccatcttcgactttctgatggggaacatggatagacatcattatgaaacttttgagaagtttggaaacgagacttttatcatccatttggataacggcagggggtttggcaagcatagccacgacgagttgtccatactggtccctttgcagcagtgctgtaggatacgcagatccacttatttgcgtttgcaactcttggcccaggaggaacaccgcctgtccttgttgatggctgaagcacttcgtgcagaccgtgtagctcccgttctcttccagcctcacttggaggcacttgataggcgcctgaggattgtcctgcgcgccgtaggtgactgtgttgagaaggacggactccactccgtggttgaggatgaccttggccctgaacatagagccgctgctggcaga

SEQ ID NO: 894 - DNA, 1758 bp, synthetic construct
  source 1..1758: mol_type = other DNA
atgaagatgatcctggttagacgctttcgtgttttgatcctgatggcttttctggcagcatgtgcccttcacttggttctcgatctgcttcccaagctcgaaaggagtgccgcccgtcccagcggagaaccaggttgctcatgtgcccagccagccgctgaagcagcagctcctgggtgggcacaggctagagggcaccccggaggtgaattggaagctgccgcatctgccgcaggtgacgccggttggcctaacaagcacactctgcgcatcttgcaggatttttctagcgacccctcctctaatctgacatctcattccctcgagaagctcccacccgcagccgaagctgctgagggcgccccacctggtcaggatccaggagttaggagaccccccgacccagcacatagacccttgcccagggacccaggtccccgtggccctgtgctgccccctggactcagtggagatgggtctctgctcactaggcttttccagcatcccctttaccaagttcctataccacccttgactgagggtgacgtcctgttcaatgtcaactcagacatccgctttaacccaaaggctgctacagccgaaaaccccgattggccccacgaaggtcctgaggacgaattcctccccaccggtgaggccgccgttgacagctaccccaactggctcaaatttcacattggtataaacagatacgaactgtatagtaggcataatcccgcagtgggagccttgctccaagatctggggacccagaaaataacctccgtggccatgaaatccggaggaacccagttgaaacttatcatgacctttcagaactatggtcaagccttgttcaagcccatgaaacaaactagagagcaggagactccaccagattttttttattttagtgattacgaacgccataatgcagaaatagcagcatttcacttggacaggatattggacttccgtagagttcctccagttgctgggaggctcgtaaatatgactaaggagattcgcgatgtcaccagagataagaagctctggagaacattcttcattagtcccgctaacaacgtttgtttttacggtgagtgttcctattactgttcaactgaacacgctctgtgcggtaaacccgatcaaatcgaaggttcactggccgcattcctgcctgatcttgccctggccaagaggaagacctggcgcaatccctggcgtcgcagttaccacaaaagaaaaaaggctgaatgggaagtggatcccgactactgtgaggaggtgagacaaactccaccctacgattcatctcataggctgctcgatgtaatggatatgactatcttcgatttccttatgggaaatatggataggcaccactacgaaacctttgaaaagttcggtaacgagactttcattatccaccttgacaacggcagggggtttggtaaacactctcacgacgagctgtctatattggtgcctcttcaacagtgctgcagaatacgcagatcaacctacctcaggctgcaactcctcgcacaagaagaacatcgtttgagccttctgatggccgaagccctgagggcagacagagttgcccctgtattgtttcaaccccatctggaagcactcgacagacgcttgcgtattgtgcttagagccgtaggggattgtgtagaaaaggatgggttgcattcagtagttgaagatgacctcggccctgagcacagggctgctgcagggagg

SEQ ID NO: 895 - DNA, 1758 bp, synthetic construct
  source 1..1758: mol_type = other DNA
atgaagatgatattggttcgcaggtttcgcgtgctgattttgatggcatttctggccgcctgcgctctgcacctcgtcttggatctgctgccaaagctcgaaagaagtgcagctcgcccctctggtgaacccggatgctcttgtgctcagcctgcagcagaagcagcagcacctggttgggcacaggcaaggggccaccctgggggagagcttgaagctgccgcatccgccgctggcgacgcaggatggcctaacaaacatacactgcgcattcttcaggattttagtagcgacccttcaagtaatttgacttcccattccctcgaaaaactcccacccgcagctgaagcagctgaaggggccccacccggtcaggatcctggagtgcgccgtccccccgatcctgctcaccgccccctgcctagggatcccggacccaggggtcccgtattgcccccaggtttgtcaggtgatggctccctgttgactaggttgttccaacatccattgtaccaagttccaatcccaccacttactgaaggcgacgtgctcttcaacgtcaactctgacatccgttttaatcccaaagcagccacagcagaaaatcctgactggccccacgagggccccgaggatgaatttctgcctactggtgaggccgctgtagattcctaccctaattggctcaaatttcacatcggcataaaccgttacgaactgtatagccgccataatcctgcagtaggcgcactgctgcaggacttgggcacccaaaaaataacaagcgttgctatgaagagcggtgggactcagttgaaactgataatgaccttccagaactacggtcaagctctgtttaaacccatgaagcagactcgcgagcaagaaacccccccagactttttttattttagcgactacgagcgccataacgccgagattgctgcattccatttggacaggattcttgactttcgtagggtgcccccagtcgccggtcgtctcgtgaatatgactaaggaaatacgcgatgtgaccagagacaagaaattgtggcgtaccttcttcatttcccccgctaataacgtttgtttttacggtgaatgcagttattattgctctacagaacatgccctttgcggcaaacccgaccaaatagaaggttctctcgcagccttcctgcccgacctcgcactcgcaaaacgcaagacctggaggaacccatggagacgttcttatcataaacgtaaaaaggctgagtgggaggttgatcctgactattgcgaagaggtcagacaaacacccccatacgattcaagccaccgcctgcttgatgtgatggatatgactatatttgattttcttatggggaacatggatagacatcattacgaaacattcgagaagtttggaaatgaaacattcatcatacatcttgacaatggacgtgggtttggtaaacattcccatgacgagctgtctatactggtcccactccaacagtgctgcaggattcgtaggagcacatacctccgcctgcagcttcttgcacaagaggaacaccgtttgtctcttctcatggccgaggccctgcgtgcagacagggtggctcctgtcctcttccaaccccacctggaggcccttgatcgtcgtttgcgcatcgtactgagggccgttggcgactgcgttgagaaagatggtcttcattccgtagttgaggacgatctcggcccagaacatcgcgctgccgccggacgt

SEQ ID NO: 896 - DNA, 1758 bp, synthetic construct
  source 1..1758: mol_type = other DNA
atgaagatgatacttgtgagacgctttcgcgttctgatacttatggcattccttgctgcctgtgccctccatctcgtattggaccttctgccaaaattggagcgtagtgcagcacgtccttcaggggaacccggctgttcctgtgctcagcctgcagctgaggcagccgcacctggatgggctcaggccagaggtcacccaggaggcgagctggaagcagccgcatccgcagcaggtgatgcaggatggccaaacaagcatacacttcgcattttgcaagatttcagttctgatccatcttccaatctcactagccatagcttggaaaaattgccccccgccgccgaagctgctgaaggtgctcctcccggccaggatcccggagttcgcaggccacctgatcccgctcacagaccattgcctcgcgatccaggcccaaggggcccagtactccccccaggactgtcaggtgacggctccctcctcacaaggctcttccagcaccccctctatcaggtacctattcctcctctcactgaaggagatgtcctttttaacgtaaactcagacatccgttttaatcccaaggcagcaaccgcagagaaccccgactggccccatgaagggcccgaggacgagttcttgccaactggagaagctgccgtagactcttatcccaattggttgaaattccacataggtattaataggtacgagttgtactcccgccataacccagccgtaggcgcattgttgcaagacctcggaactcagaaaatcacatcagttgctatgaagtctggtggtacccaattgaagctcatcatgacctttcaaaactacggccaagccttgtttaagcctatgaagcaaaccagagaacaagaaactcccccagatttcttctacttctcagattacgagagacataatgctgaaattgcagcctttcatctggacaggattttggacttcaggagagttccccctgtggctggcagacttgtgaacatgacaaaggagatccgcgacgttactcgtgataaaaagctttggcgcaccttttttatttcccctgccaacaacgtttgcttctatggtgagtgttcatactactgctccactgagcatgccctgtgtgggaagcccgaccaaatcgaagggtctctcgctgcatttctgccagacttggccctggctaaacgtaaaacttggagaaatccttggagaaggtcctaccacaaacgtaaaaaggcagaatgggaggtagaccctgactactgcgaagaagtgagacagaccccaccttatgattcctctcatcgcctgctggatgtcatggacatgaccattttcgatttccttatgggcaatatggaccgtcatcattacgagactttcgagaagttcggtaatgagacatttataatacacttggataacggacgcggtttcggcaaacatagtcatgacgagttgagcatcctggtccctcttcaacaatgctgtaggattcgtagaagtacatatttgcgcctgcagctcctcgcacaggaggaacatcgtttgagcctgctcatggccgaggctttgcgtgccgatagggttgcccccgttttgtttcaaccacatctggaggccctcgatagacgtctgaggattgtattgagggctgtgggggattgtgtagaaaaagacggactccattcagtcgtcgaggatgaccttggtcccgaacatcgtgcagcagccggcagg

SEQ ID NO: 897 - DNA, 1758 bp, synthetic construct
  source 1..1758: mol_type = other DNA
atgaaaatgattctggtaaggcgcttcagagtcctgattctgatggccttcctggccgcatgcgctttgcacctggtactggaccttttgcccaagctggagcgttccgctgccaggccaagcggagaaccaggttgtagctgcgcacagccagctgctgaagctgcagctcctggttgggctcaggccagaggtcatcccggcggtgaactcgaggcagctgcaagtgccgccggagacgccgggtggcctaataagcacacattgagaattcttcaggatttttcatcagatcctagctctaatctcacatcacacagtctggagaaattgccacccgcagctgaagcagccgaaggggcaccaccaggacaggatcctggtgtaagacgtcccccagatccagcacatcgcccccttcccagagaccccgggccaagggggcctgtgctcccacctggattgagtggggatggtagcctcttgactcgtcttttccagcaccccctctaccaggttcccattccacccctcactgaaggagatgtgttgttcaatgtaaattctgacatccgctttaaccccaaggctgccacagctgagaaccccgattggccccatgaagggcccgaggatgaatttctccctactggcgaagctgccgtcgactcttatcccaattggcttaaatttcatattggaataaataggtacgagctctacagtcgtcataatccagccgtgggagcacttctccaggacttgggaactcagaagataacatcagttgccatgaaatcagggggtacacagttgaaattgatcatgacctttcagaactacggacaggccctgttcaagccaatgaaacagacacgtgaacaagaaacaccacctgactttttctacttctccgactacgaaagacataatgccgaaatcgccgcatttcatcttgataggatacttgactttaggcgtgtcccacccgtcgctggaaggctcgtaaatatgactaaggagattagagacgtgactagggataagaaactgtggcgtactttttttatatctcctgccaataatgtatgtttctacggcgagtgctcttattattgcagcacagaacacgctttgtgtggaaaaccagaccaaattgagggatctcttgctgctttcttgcccgatttggcccttgcaaaacgtaagacttggcgtaatccatggagacgcagttaccataaacgtaaaaaggctgaatgggaggtcgaccccgattactgcgaagaagtccgtcaaacccccccatatgactcctcccacagactcctggatgtgatggacatgacaatctttgacttccttatggggaatatggacagacaccactatgagactttcgagaagtttggaaatgagacctttattatacacttggacaatgggagaggcttcggaaaacatagtcacgacgaactctccatccttgtcccattgcaacagtgttgtagaattagacgcagcacatatcttagacttcaactgttggcacaggaagaacatcgtctttccctgcttatggctgaagctctccgtgcagatcgcgtcgctcctgtgctgtttcagccccacctcgaagctcttgacagacgtctcaggatagtccttagggccgtgggagattgcgtcgaaaaggatggcctccactcagtagtggaagatgacctcgggccagagcatagagcagcagctggccgc

SEQ ID NO: 898 - DNA, 1758 bp, synthetic construct
  source 1..1758: mol_type = other DNA
atgaaaatgattctggtccgccgtttcagggtacttattctcatggcattcttggcagcttgcgctctccacttggttttggaccttctccctaagcttgaacgctctgcagccagacctagtggagagcccggatgctcttgtgcccagcctgcagccgaagcagctgctccaggatgggctcaagcccgcggacatcctggaggggaacttgaggcagctgcatccgctgccggcgatgctggatggcctaacaaacataccctccgtatacttcaggatttttcctccgaccccagtagcaatttgacaagccattctctggagaaactgccacccgcagccgaagctgcagaaggagcccctccaggacaagaccctggagttagaagaccacctgatccagcccacaggcctttgccccgtgatcccgggccacgtggaccagtccttccccctggcctgagtggcgatggatctcttctgacaaggctgtttcaacaccctctgtaccaggtgcctatccctcccctcacagaaggtgacgtcttgttcaatgtgaattctgacatcaggtttaatcctaaagctgctaccgcagagaaccctgactggcctcacgaaggaccagaggacgagtttctccctactggagaagccgccgtagattcttatcctaactggctcaaatttcacatagggattaaccgttatgaactctacagcaggcacaacccagccgttggcgctctcctgcaggatctcggaacacagaagataacatccgtcgcaatgaagtctggagggactcagcttaaactgattatgacattccaaaattatggccaagcactttttaaaccaatgaagcaaacccgcgaacaagaaacaccccctgactttttctatttttccgattacgagagacacaatgcagagattgcagcctttcacttggataggatcctggactttcgtagagtcccccccgtcgccgggcgtctggtcaatatgactaaagaaattcgtgatgtcaccagagacaaaaagctgtggaggacttttttcatatctccagccaataatgtttgtttttacggcgaatgtagttattattgcagtacagaacacgcattgtgtggcaagcccgaccagattgaagggtctcttgccgcttttttgccagatcttgcattggccaagcgcaaaacttggcgcaacccatggaggcgctcctaccataagcgcaaaaaagctgagtgggaggttgatcccgattactgtgaagaagttaggcagacacctccctatgacagctcacatcgcttgctggatgtgatggatatgacaatcttcgattttctcatggggaacatggatagacatcattacgaaacttttgaaaaatttggcaacgagaccttcatcatccatctcgataacggtagagggttcggtaagcacagccatgatgagctctccattcttgtcccactccaacaatgttgcagaatacgccgctccacctatctccgtcttcagctgctcgctcaagaagagcatcgcttgagtcttcttatggctgaggcactgagagcagacagggtcgcccctgtacttttccagccacacctcgaggcactggaccgtcgccttagaatagtacttcgtgccgttggggactgcgtagaaaaggacggactccattcagtagttgaagatgatctcggtccagaacaccgtgcagcagctggccgc

SEQ ID NO: 899 - DNA, 1758 bp, synthetic construct
  source 1..1758: mol_type = other DNA
atgaagatgatcttggtcagacgctttagagtacttatactgatggctttcctcgccgcttgtgcactccacctggtcttggacctgttgccaaagctggaacgttctgccgcaagacccagcggagaacccggttgcagctgtgcacagcccgcagccgaagccgctgcaccaggctgggctcaagcccgcgggcacccaggcggagaattggaagcagccgcttccgcagccggtgacgcaggttggcctaataaacatacattgcgtatcttgcaggatttcagttctgatcctagttccaatcttacttcacactcactggaaaagctcccccctgccgctgaggccgccgaaggagctccccctggtcaggacccaggggtgcgtaggccccccgaccctgcacatagacccctgccacgtgatcctggacccaggggaccagtactgccacctgggctcagtggggacggctcccttcttacaaggctgttccaacatccactctaccaagtaccaatcccaccacttactgagggcgatgtcttgttcaacgtaaactctgacatccgtttcaatccaaaggccgccactgcagagaacccagactggccacacgaaggtcccgaggacgaattcctgcccacaggagaggctgcagttgatagctatcccaactggcttaagttccacataggcataaaccgctacgaattgtattcccgtcataacccagctgtaggcgcactgctccaagatctgggcacacagaagatcacctcagtggctatgaagagcggcggaactcaactcaagttgataatgacctttcaaaactacgggcaggcactcttcaagcccatgaagcaaactagggagcaggaaactccacccgatttcttctacttttccgattacgagaggcacaatgcagaaatagccgcctttcacttggatcgcattctggattttcgcagagttccccccgttgctggtcgccttgtaaatatgactaaggaaatccgtgatgtaaccagagacaagaaactctggcgcacatttttcatatcccctgcaaacaatgtttgcttctacggagaatgcagctattactgctctactgaacatgcactttgtgggaagcctgaccaaatagaaggctccttggccgcctttctcccagacttggctctcgctaaacgcaaaacttggcgcaatccctggcgcagatcatatcacaaaaggaagaaggcagagtgggaagtcgatcccgactattgtgaggaagttaggcagaccccaccttacgattcctcacacaggcttctcgatgtcatggatatgaccatctttgacttcctcatgggaaacatggacaggcaccattatgagacctttgaaaagtttgggaatgagactttcattattcatcttgataatgggagaggcttcggaaaacattcacatgacgagctgtccatactggttcccctgcaacaatgctgtcgtattaggaggtccacttatcttagattgcagctcttggcccaggaggagcataggctttctttgctgatggctgaagctcttagagctgacagagtcgccccagtcttgttccaacctcatctggaggccctggataggagattgagaattgttctgcgtgctgttggagactgtgtggagaaggatgggttgcactctgtcgttgaagatgatcttggtcctgaacacagggccgctgccggacgc

SEQ ID NO: 900 - DNA, 1758 bp, synthetic construct
  source 1..1758: mol_type = other DNA
atgaagatgattttggtgagacgtttccgtgtactgatacttatggcatttctcgctgcctgtgcactgcacctggtacttgatctcctgccaaagctcgaacgttctgctgcaaggcccagtggcgaacctggctgcagttgtgcccaacctgccgcagaagctgcagctccaggatgggctcaggcccgcggacaccctggcggtgaattggaggctgctgctagcgctgccggagatgctgggtggcccaacaaacatacactgagaatactccaagacttctctagtgatcctagttcaaacctgaccagtcactccctcgagaaacttccaccagccgctgaagctgctgaaggtgcaccccccggacaagaccctggtgtcagaagacctcccgatcccgctcatcgtccccttcctcgcgaccctgggcctagaggcccagtgcttccacccgggcttagtggggacggctctttgcttacccgcttgtttcagcatcctctttatcaagttcctattccccccctcactgagggcgacgtcttgtttaacgttaactctgatattcgtttcaacccaaaggccgccaccgccgaaaaccctgactggccacatgagggcccagaggatgaattcttgcccacaggcgaggcagccgttgattcttacccaaattggctcaagttccatataggtatcaacaggtatgaattgtattccagacacaatcctgctgttggtgccctccttcaagatctgggtacacaaaaaatcactagcgttgcaatgaaatccgggggtacacagttgaaattgattatgaccttccagaactatggtcaggccctcttcaaaccaatgaagcagactagggagcaagagactccacccgacttcttttacttctcagattacgagagacacaacgccgagattgctgccttccatcttgatcgtatattggatttcaggagagtacctccagtggctggccgccttgttaacatgacaaaggagattagggacgtgaccagggataagaaactctggaggacctttttcatatcccccgccaataacgtctgtttttatggagagtgttcttattattgcagcactgaacacgcactgtgtggaaaaccagatcagatcgaggggtccctcgctgcttttctgcctgatctcgctctcgctaaacgtaaaacttggcgtaacccatggcgcagatcataccacaaaagaaagaaggcagagtgggaagtggaccccgattattgcgaggaggtacgtcagacaccaccatatgatagctcacacagacttctcgacgtaatggatatgaccatatttgactttctcatgggaaatatggatcgtcaccactacgaaacattcgaaaagtttggaaatgaaactttcatcattcaccttgataacggccgcggatttggcaaacactctcacgatgagctgagtatactcgtgcctctccagcaatgttgtcgcatccgccgttccacttatctcaggttgcaattgctggcccaggaggaacaccgcctttcactgctcatggccgaagctcttcgtgctgatcgtgtcgcacctgtgcttttccaaccacacttggaggctctcgatcgccgtctccgtattgtgttgagagccgttggggactgcgttgagaaggacggtttgcacagtgttgtagaagacgatcttggtcctgagcacagggcagcagctggtcgt

SEQ ID NO: 901 - DNA, 1758 bp, synthetic construct
  source 1..1758: mol_type = other DNA
atgaagatgattcttgtcaggcgtttcagagtccttatattgatggcttttctggccgcttgtgctctgcacttggttctcgatctccttcccaaactggagaggagcgcagcccgtccttcaggggaaccaggatgcagctgtgcccaacctgccgccgaagctgccgcaccagggtgggcccaagccaggggtcatcctggaggagagctcgaggctgcagccagtgccgctggcgacgcaggttggccaaacaagcacacattgcgtatccttcaagacttttcaagcgacccatcttcaaacttgactagccacagtttggagaaactgcctcccgctgcagaggcagcagagggagcaccccccggtcaagatccaggtgtgaggcgccctcccgacccagcacacaggccacttccaagggaccccgggcctagggggcctgtcctccctcctggtctctcaggggatggctcccttttgaccaggctcttccaacatcccctgtaccaagttccaatccctccactgacagaaggggacgttctgttcaacgttaacagcgatatacgcttcaatcccaaggcagcaactgctgagaatcctgattggccacatgaggggccagaagacgaatttttgccaactggagaagccgcagtagatagttatcccaattggttgaagttccacataggtataaacaggtacgagttgtactcccgtcataaccccgcagtcggcgctcttttgcaggatctgggcactcaaaagattacctcagttgccatgaagtcaggaggtacccaactcaagctgatcatgactttccagaattatgggcaagctctttttaagccaatgaagcagacccgtgagcaagaaactccccctgacttcttttatttctctgactatgagcgccacaacgctgagatagccgctttccatctggacagaatactggattttaggcgcgtgccacctgtcgcaggccgcctcgttaatatgactaaagagattcgtgatgtcactagagacaagaagttgtggagaacattcttcatctctccagccaacaatgtctgcttttatggcgaatgttcctactattgctcaaccgagcatgctctctgcggaaagcctgatcagatcgaaggaagtctggcagcttttttgcccgacttggcccttgcaaaaagaaaaacatggagaaatccctggcgccgttcttatcacaaaaggaaaaaggctgaatgggaggttgatcccgattattgcgaagaggtgaggcaaactcctccttacgattcctcccatcgtttgctggatgtgatggatatgacaatatttgactttctcatggggaatatggatcgccaccattacgaaactttcgaaaagttcggcaatgagacatttattatccatctggataacgggcgcggcttcggtaaacattcccatgatgaactgtcaatattggttccattgcaacagtgctgcagaatacgtagatcaacttatctcaggctccaactcctggcccaggaggaacaccgtctgtctttgctcatggcagaggcacttcgcgctgaccgcgttgcccccgtcttgtttcaacctcacctggaggcactcgaccgccgtcttcgtattgttctgcgtgccgtaggtgactgcgtcgaaaaggacggtctgcattccgtagttgaagatgacctcggtcccgaacacagagctgcagccggacgc

SEQ ID NO: 902 - DNA, 1758 bp, synthetic construct
  source 1..1758: mol_type = other DNA
atgaaaatgattctcgtacgtaggtttagggttcttattctgatggcattcctcgcagcttgtgcacttcatctggtcctcgaccttcttcctaagcttgaacgctctgctgcaagaccctcaggcgaacccgggtgtagctgtgcccagcccgcagctgaggccgcagcaccaggttgggctcaggcaagaggtcatcctgggggagagcttgaagcagccgcctccgctgctggcgacgccggctggccaaataaacacacattgaggatcctccaagatttctcctctgatccaagttctaacctgacttcccatagcctcgagaagcttccacccgccgctgaggccgccgagggggcaccaccaggccaagatccaggtgttaggaggcctccagatccagcccaccgccctcttccaagagaccccggtcctcgcggacccgtactgcctccaggcctttccggtgatggaagcctgctcacacgtctgtttcagcaccctttgtatcaggtacccattcctcccctcacagagggcgatgtgttgtttaatgtcaacagcgacatccgtttcaatcctaaagccgctaccgctgaaaaccccgactggcctcatgagggtcctgaggacgagtttttgcccactggggaagcagcagtagattcctacccaaattggctcaagtttcacataggtatcaacaggtacgagttgtattctaggcacaatcccgccgtgggcgcactgctgcaagatctcggtacccaaaaaattacttcagtagctatgaagagcggtgggacccaattgaagctgattatgacatttcaaaactacggccaagctttgtttaagccaatgaaacagaccagagagcaagagactcctcctgattttttctacttttctgattacgaaagacataacgccgaaatagcagcatttcacctggatcgtattctggactttcgtagagtcccaccagttgcaggaaggctggttaatatgactaaggagattagggatgttacccgtgataagaaactctggaggacctttttcatatcccctgcaaataatgtctgcttttatggggagtgctcctattattgtagtacagaacacgcactgtgtgggaaaccagaccagatagaaggaagccttgctgcatttctgcccgatctcgcccttgccaagcgcaagacatggaggaatccatggcgccgctcataccacaagaggaaaaaagccgaatgggaggtagaccctgattattgcgaggaagtaagacaaacccccccttatgatagttcccaccgtctgcttgatgtaatggatatgacaatattcgacttcctgatgggaaacatggatagacatcactatgaaaccttcgagaagtttgggaacgaaactttcattatacacttggataatggaaggggatttggaaagcacagccatgacgagctgtcaatcttggttccccttcaacagtgctgccgcataagacgtagtacctacctcaggctccagctgctggcccaggaggagcacaggcttagtctcttgatggccgaggcacttagagccgacagggtagctccagtgttgttccaaccccatctggaggctctggaccgtaggctcagaattgtcctccgtgctgtgggcgattgcgtagagaaagatggcctccattctgtcgtggaagatgatttgggccccgagcatagagccgctgctgggcgt

SEQ ID NO: 903 - DNA, 1758 bp, synthetic construct
  source 1..1758: mol_type = other DNA
atgaagatgatcctggttaggaggtttagagtcctcatactgatggcttttcttgctgcctgcgcacttcatttggttctggatctccttcccaaacttgagcgttctgcagctcgtcctagcggagagcctggctgttcctgtgcacagccagcagccgaggccgcagctcccggatgggcacaagccagaggtcacccaggaggagaactcgaagcagccgcctccgcagctggcgatgcaggttggcctaacaagcacacactgagaattctccaggacttctcctcagaccccagtagtaatcttactagccattcactggagaagctgccccctgccgctgaggcagccgaaggagcccccccagggcaagatccaggcgttaggagaccccctgaccccgctcataggcctttgcccagagacccaggtcctaggggaccagtactgccaccaggcctgagtggggatggaagcctcctcacccgtttgtttcagcatcctctgtaccaagtccctattcccccactgacagagggggatgttctttttaatgtgaactctgacatcagatttaatcccaaggctgctactgctgaaaaccctgactggccccacgaaggtcctgaagatgagtttcttcctacaggcgaagccgccgttgattcttacccaaactggcttaaattccatataggcatcaacaggtatgagctgtactctagacacaacccagcagtaggagcactcttgcaggatttgggaacacagaagataacctccgttgcaatgaaatctggggggactcagcttaaattgattatgacctttcaaaattacggacaagcattgtttaagcccatgaagcaaacaagagagcaagaaactcccccagactttttctattttagtgactacgagcgccataatgctgaaatagctgcatttcatcttgatcgtatcctcgatttccgtcgcgttcctcctgtcgctgggcgcctggttaacatgactaaagagatccgcgacgttactcgcgataaaaagctgtggcgcacttttttcattagtcctgctaacaatgtctgcttctatggagagtgtagctactattgttcaaccgaacacgccttgtgcggcaaaccagaccaaattgaaggcagccttgctgctttcctgcctgatcttgcccttgccaaaaggaagacctggcgcaatccatggcgcagatcatatcacaaacgcaagaaagccgagtgggaggtagaccccgattattgtgaagaggtacgccagacaccaccttatgacagctctcaccgccttctggatgtaatggatatgactatttttgattttcttatgggcaatatggatcgccaccattatgaaacttttgagaaatttggtaacgagaccttcataatccacctcgacaatggcagagggtttggcaaacattcacatgacgagctctccattcttgtccccctgcagcaatgttgtagaatacgtaggtcaacctatctgcgtctgcaacttcttgcccaagaggaacacagactcagtctcttgatggcagaagcccttcgtgctgacagggtggctcccgttctgtttcaaccacatctcgaagctttggatagaaggttgaggattgtgcttcgtgccgtcggtgactgcgtagagaaagatggtcttcacagtgtagtagaagacgatcttggccctgaacatagggcagctgctggtcgt

SEQ ID NO: 904 - DNA, 1758 bp, synthetic construct
  source 1..1758: mol_type = other DNA
atgaagatgatccttgtacgtaggttccgtgttctgatacttatggcctttctggctgcatgcgccctccatcttgtcctggacctgttgcctaaactcgagcgctctgcagcaagaccttctggggagcctgggtgttcatgtgcccagccagcagcagaagcagctgcaccaggttgggctcaggcaaggggtcatcctgggggagagttggaggcagccgctagtgctgcaggcgacgctggctggcctaacaaacatacattgcgcatacttcaagacttttcatccgatccctcctcaaatctgacctcacacagtttggagaaacttccccctgccgctgaagcagctgaaggtgccccccccggtcaagatccaggagtccgcagaccacccgatccagctcacagacccttgcctcgcgacccagggcctcgcggtccagtcctgcctcctggtctctccggcgacgggtctctgctcacccgcctctttcaacatcctctttaccaagtgcctattccccctcttacagaaggtgatgtcctgtttaacgtcaattcagacatcagatttaaccctaaagctgccaccgcagaaaaccctgattggccacatgagggtcccgaagatgaattcctccccactggggaggccgccgtcgactcataccccaactggctgaagttccatatcggaattaacagatatgagctgtacagtcgccacaaccctgccgtcggtgcactccttcaagacctcggtactcagaaaattacaagtgtagctatgaagagcggaggcacccagctgaaactgattatgacctttcagaactacggtcaagcactcttcaagccaatgaaacagactcgtgagcaagaaaccccccccgattttttctactttagtgactatgaacgccacaatgccgagattgctgctttccatttggatagaattctcgactttaggagggttccacctgttgctggtaggttggttaatatgaccaaagaaatacgcgacgtgaccagggataaaaagttgtggaggacatttttcatttctcctgctaataatgtatgcttttatggcgaatgcagctactattgctccaccgaacacgccctctgcggaaaaccagatcagatagaggggtctctcgctgctttcctcccagatctggctctcgctaagcgcaaaacctggaggaacccctggcgcaggtcatatcataagcgtaaaaaagccgagtgggaggtggatcccgactattgtgaggaagtcaggcaaacaccaccttatgacagctcccacagacttcttgatgtaatggatatgactatatttgattttctgatgggcaacatggaccgccaccattatgaaacctttgagaaattcggtaatgagacattcattatacatctggacaacggacgcggcttcggcaagcatagtcatgacgaactctctatcttggtaccactgcaacagtgctgtaggatccgcagaagcacatacctcaggctgcaactgctggcccaagaggagcacagacttagtttgcttatggccgaggctttgagagcagacagagtagccccagttctgtttcaaccacatctcgaagcactcgatcgtcgtctccgtatagtgctccgtgcagttggtgattgcgtagaaaaggatgggttgcactctgttgtggaagatgatctcggtcctgaacatcgcgcagcagcaggtcgc

SEQ ID NO: 905 - DNA, 1758 bp, synthetic construct
  source 1..1758: mol_type = other DNA
atgaaaatgatactcgtacgtaggttccgcgtgttgattctcatggcctttttggccgcctgtgcacttcaccttgtattggacctgcttccaaaactggaaagatctgctgcaaggccatcaggtgagcccggctgcagttgcgcacagcccgcagccgaagctgctgcacccgggtgggcacaggcacgcggtcatccagggggtgaactcgaggctgctgcatccgcagctggtgatgctggctggcctaataaacacacattgcgcatactccaggacttcagtagcgacccatcttcaaaccttactagccactccctcgagaagctccctccagcagccgaggctgcagaaggcgcacctccaggccaggatcccggcgtgcgccgtccccccgatcccgctcataggcctttgccaagggaccccggaccaagaggacccgtactcccaccagggctctcaggtgacggtagccttctgactcgtctgttccaacatcccctctatcaggttcctattcctcctctcacagaaggggacgtattgtttaatgttaactccgacatacgcttcaatcctaaagctgctactgctgagaacccagattggccccatgaagggccagaagacgagtttctgcctaccggggaagcagccgtcgactcatacccaaactggctgaagtttcacatcggtatcaacaggtacgagctctacagcagacataatcccgccgtaggtgccctgttgcaggatttgggtactcaaaagattacctcagtggcaatgaagtccggtgggacccagttgaaactcataatgacatttcagaattacgggcaagccctcttcaaacccatgaaacagactagagagcaggagacaccacccgattttttctatttttctgattatgaacgtcataacgccgaaattgcagctttccacctggacaggatcttggactttcgtagagttccccctgtcgccggccgtctggttaacatgaccaaggaaatcagagacgttacccgcgataagaaactctggcgcacattcttcatttcacctgcaaataatgtgtgcttctatggtgagtgtagttattactgctccactgagcacgcactgtgcgggaagcctgatcagatcgagggaagtttggccgcattcttgcccgatcttgcactggccaagagaaaaacatggcgcaatccttggagaagaagttatcataaaagaaagaaggccgaatgggaagttgaccccgactactgtgaggaagtccgccagacccctccctatgacagtagtcatcgtcttctcgatgttatggatatgaccattttcgacttcctgatgggaaacatggaccgccatcactacgagacttttgagaagttcggcaatgaaactttcatcattcacttggacaatggtagggggtttggcaagcactctcatgacgaactgagtatattggttcctctgcaacaatgctgtagaattcgtaggtccacctatctgaggctccagctcctcgcccaggaggaacacagactcagccttttgatggccgaagcattgcgcgccgatcgtgtcgctcctgtcttgtttcagcctcaccttgaagcccttgatagacgtcttaggatcgtgctgagagcagttggggattgcgtagaaaaagatggcttgcattctgtcgtcgaagatgatcttggacccgagcacagggcagccgcaggcaga

SEQ ID NO: 906 - DNA, 1758 bp, synthetic construct
  source 1..1758: mol_type = other DNA
atgaagatgatcctcgtcaggcgtttccgtgtgctcattctcatggctttcttggcagcatgcgctcttcacctcgttcttgacctgctgcctaaactggagcgcagtgccgcccgcccaagcggagaacccggatgtagttgtgctcagccagcagctgaggccgccgccccaggctgggcacaggcacgcggtcaccccggtggcgagcttgaggcagctgccagcgctgctggcgatgcaggctggcctaataaacacaccctgagaatattgcaagacttcagctccgatccatccagtaatctgacttcccactctcttgaaaagctgccccctgctgccgaggcagcagaaggcgcccccccaggccaagacccaggcgtgcgcaggcccccagatcccgctcacagaccactcccccgtgaccccggtcccagagggcccgtattgccccccggactgagcggggatggatccttgttgaccaggctcttccagcatccactctatcaagtacccatacctcccttgactgaaggcgacgtattgttcaatgttaattcagacattaggttcaatcctaaggccgctacagcagaaaatcctgattggccccatgagggaccagaagacgaattcctgcccacaggcgaggctgccgttgacagctatccaaattggctcaaattccacattgggattaacagatatgaactctattccagacacaacccagcagttggtgcactgcttcaagatctcggaacacaaaagattacatccgtagccatgaagtccggaggcactcagcttaagttgattatgacctttcaaaactatggtcaagcactctttaagcccatgaaacaaaccagggaacaagagacaccacccgattttttttattttagcgactacgaaagacataatgcagaaattgctgcttttcaccttgacagaatcctggactttcgtcgtgttcctcctgtagcaggtcgcctggtaaacatgacaaaagagattcgcgatgtaacacgcgataagaagctctggaggactttttttatcagtcccgctaataacgtttgcttttacggagaatgttcatattactgttcaactgagcacgccctgtgcgggaagcctgaccagatagaaggaagtttggcagcatttttgccagaccttgccctcgctaaacgtaaaacctggcgtaacccttggagacgttcctaccataagcgcaaaaaggctgaatgggaggtggatcccgactactgcgaggaagtacgccaaacccctccttacgatagtagccatcgccttctcgacgtaatggatatgacaatattcgactttctcatgggtaacatggatagacaccattacgaaacatttgagaagtttggtaacgagacttttatcatacaccttgacaacggccgcggttttgggaagcattctcatgacgagttgtctatattggtccctcttcaacagtgctgccgtattaggaggtccacctacctgcgtctccaattgctcgcccaagaagagcacagactcagcctcttgatggcagaagcactgagggccgacagggttgcccctgttctttttcagcctcatttggaagcacttgacaggcgtctccgcattgtcttgagagccgttggggattgtgttgaaaaggatgggctccactcagtagtagaggatgatcttgggccagagcatagagctgcagccggaagg

SEQ ID NO: 907 - DNA, 1758 bp, synthetic construct
  source 1..1758: mol_type = other DNA
atgaagatgattctggtaaggcgcttccgtgttctcatccttatggcatttcttgccgcctgtgctttgcatttggtcctcgaccttcttcctaagctcgaaagaagcgcagcaaggccaagcggagagccaggatgttcatgcgcccagccagcagctgaggctgcagctcctggctgggctcaggccaggggtcaccccggtggggaacttgaggcagctgcttcagcagccggtgatgctggctggccaaacaaacacaccctgcgtatattgcaggatttttcttcagatccttcatcaaaccttacctcccatagcctggagaaacttcctcccgcagctgaagccgctgagggggcccctccaggacaagaccctggcgtaagaagacctcccgaccccgcacacagacctttgcccagagaccctggcccacgtggacctgtacttcctccaggtttgtctggcgatggtagtttgttgacccgcctcttccagcaccccctctaccaggttcctatacccccacttacagagggtgacgtgcttttcaacgtcaatagtgacatacgtttcaaccccaaagctgccacagccgagaaccctgattggcctcatgaaggtccagaggatgagttcttgccaaccggggaggccgctgtggattcctacccaaattggcttaagttccacatcggcataaaccgctacgaactgtactcacgccataacccagccgttggtgcactcttgcaagacctcggcacacagaaaataaccagtgttgctatgaagagcggaggcacccagctgaaacttattatgacatttcagaactatggacaagcactgtttaagcccatgaagcaaactagggaacaggaaactccccctgacttcttctatttctctgactacgagcgccacaatgcagaaattgctgccttccatttggaccgtattttggatttcaggagggtgcctcccgtcgccgggcgccttgtcaacatgacaaaggagatccgcgacgtgaccagagataagaaactctggaggaccttctttatctcacctgccaataatgtatgcttttatggtgaatgtagttattactgctctacagaacatgcactgtgcggtaagcctgatcaaatagaaggatctctcgctgcattcctgcccgacctggctctcgctaagcgcaagacatggcgtaacccttggcgcaggtcttatcataagagaaaaaaggcagaatgggaagttgatccagactattgtgaagaggtgcgccagaccccaccatacgactccagccatagacttcttgatgtaatggatatgaccatatttgactttcttatggggaacatggacaggcaccattatgaaacatttgagaaattcggtaatgagacatttataattcacttggacaacgggcgtggttttggaaagcatagtcatgacgagctgagtatcttggtacctctgcagcaatgttgccgtatccgtaggtctacttatcttcgcctccaacttttggctcaggaggaacatcgcctgtccttgctcatggctgaagcccttcgcgctgacagggtggcacctgtactcttccaaccacacttggaggctctcgacaggaggttgagaatcgtgttgagggctgttggagattgtgttgaaaaggatgggcttcacagtgtagtagaggatgacttgggtcctgaacacagggccgcagccggacgc

SEQ ID NO: 908 - DNA, 1758 bp, synthetic construct
  source 1..1758: mol_type = other DNA
atgaaaatgatactcgttcgtagattcagggttttgatcctgatggctttcttggctgcatgcgcccttcatcttgtgttggacttgcttccaaaacttgaacgcagcgccgcaagaccttctggagaaccaggatgctcatgtgcccaaccagcagcagaggccgcagcacctggctgggcccaagcccgtggccatcctggcggagagcttgaagctgctgcatccgccgcaggtgacgccggttggcctaacaagcatactcttaggatcctgcaggacttctcttcagatcccagttcaaacctgacctctcattcattggagaagctgccccccgccgcagaagcagcagaaggtgctcctccaggccaggatccaggtgtgaggaggcctcccgaccctgctcatcgccccttgccccgcgaccccggcccaagagggcctgttctcccacctggtttgtctggtgatggttctctcctgaccagacttttccaacatcccttgtatcaggtccccatccctccactcactgaaggggacgttcttttcaacgtaaattctgatataagatttaacccaaaggccgctacagctgaaaatcctgactggcctcacgaagggcctgaggacgaatttcttcccaccggcgaagcagcagtagactcctaccccaattggttgaagtttcatattgggataaaccgttatgaactctactccaggcataaccctgccgttggcgcacttcttcaggatttgggcactcagaagattacctctgttgcaatgaagagtggtggcacacaactgaaactgataatgacattccagaactatgggcaagccctttttaagcccatgaagcagacccgtgagcaggagactcccccagattttttttacttttcagattacgaaaggcataatgctgagatagccgcttttcacttggatcgcatactcgatttcaggagagtacctcctgtagccggtcgtcttgtcaatatgacaaaagagattagggatgttacaagggacaaaaaattgtggcgtaccttttttatatcaccagccaataacgtatgtttttatggggaatgctcatactattgttccaccgagcatgcactttgtggaaagcccgaccagattgaaggttctctcgctgcttttctcccagatttggcactggccaaaagaaaaacatggaggaacccctggcgcagatcatatcataaacgcaaaaaggctgaatgggaagttgatcctgactactgtgaagaggttcgccagacaccaccttacgatagttcccatagacttcttgacgtcatggatatgacaattttcgattttctgatggggaacatggatcgtcatcactacgagactttcgagaaattcggtaacgagaccttcataattcatttggataacggcaggggttttggtaaacattcccatgatgagctgagtatactggttccattgcagcaatgttgtaggattcgtagatccacataccttcgcttgcagttgctggctcaggaagaacataggctttccctcctcatggctgaggctctccgtgccgacagggtggcacccgttctgtttcaaccccaccttgaagctctggatagacgcctcaggatagtgctcagggccgtaggcgactgtgtcgaaaaggatggtctccactctgtggttgaagatgatctggggccagagcatagggccgccgcaggacgc

SEQ ID NO: 909 - DNA, 1758 bp, synthetic construct
  source 1..1758: mol_type = other DNA
atgaaaatgatactggtgaggagatttcgtgtccttatattgatggccttcctggcagcatgtgccttgcatctggtcctcgatttgctccccaagctggagagatcagcagcaaggccctctggtgaacctggatgctcttgtgcccaacctgctgcagaggctgctgctcctgggtgggcacaagcccgcgggcaccctgggggtgagttggaagcagccgcttctgccgctggtgatgcaggttggcctaataaacacactctgcgcattttgcaagattttagctccgatccatcatccaatcttactagccacagcctggagaaattgccccccgcagccgaagccgcagaaggagctccccctggtcaggatcctggtgtcaggcgtccacccgaccccgctcataggccactcccacgtgaccccggccctagggggcctgtactgccccccggattgtccggagacggtagtctcctcactagattgttccaacatcccctctatcaggtgccaatcccacctcttaccgagggcgatgttctgttcaacgtcaacagtgatattaggttcaaccctaaagcagcaaccgcagaaaatcctgattggcctcatgaaggccccgaagatgagttccttccaacaggtgaggcagctgtggattcatatcccaactggctcaaattccacatcggtatcaacagatacgaattgtattccagacacaatcctgcagtgggtgcattgcttcaggatttggggacccagaagataacaagtgtcgccatgaagagtggcggtacacaactgaagttgattatgactttccaaaattatggtcaagcccttttcaaacctatgaaacagacacgtgaacaggagacccctccagactttttttacttctcagactacgagaggcacaatgctgagatcgcagcctttcacctggataggatcctcgacttccgcagagtcccaccagttgctggacgtctggttaacatgacaaaggagatccgcgatgttacccgcgataaaaagctttggagaacttttttcatctcacctgcaaacaatgtttgcttttatggggagtgctcctattattgttcaacagagcacgcattgtgtggaaagcccgatcaaatagaaggatcattggccgcttttttgcccgacttggccctggctaaacgcaagacatggcgcaatccctggaggcgctcttaccataagaggaagaaagcagagtgggaggtcgatcccgattattgcgaagaggtccgccaaacacctccttacgactcctcacacagacttcttgatgtcatggatatgacaatctttgattttctgatgggtaatatggatcgccatcattatgagactttcgaaaaatttgggaacgaaactttcattatccaccttgacaatgggcgtggattcggtaagcattcccatgacgagctgtctatcctcgtccccctccaacaatgctgtagaatccgcagatctacctacttgcgtcttcagttgctggcacaagaagaacacaggctgtcccttcttatggctgaggccttgcgtgctgaccgcgtggcacccgtgctttttcaaccacacctggaagcattggacaggagattgcgtattgtactgcgcgccgtaggtgattgcgtggagaaagacggcttgcactctgtggtagaggatgaccttgggcctgagcaccgtgcagcagcagggcgc

SEQ ID NO: 910 - DNA, 1758 bp, synthetic construct
  source 1..1758: mol_type = other DNA
atgaagatgattttggtcaggcgtttccgtgtactgattctgatggcattcttggccgcctgtgcccttcaccttgtgcttgatttgctgcccaaactggaacgtagtgcagcccgcccttcaggcgagcccggatgtagctgcgctcagcctgccgcagaggcagcagctcctggatgggcacaagctcgtgggcatcctgggggtgaacttgaggcagcagcaagtgccgcaggcgacgcaggttggcccaacaaacacactcttcgcatacttcaagacttcagctccgatcccagttctaatttgacctcacattccctggaaaaactcccacccgctgccgaagctgctgagggagcaccccccggccaggatccaggtgttcgtagaccccccgaccccgctcacagaccactcccaagagaccctggtcctaggggacctgtgctccctcctggcctttctggtgacggttcactgcttacccgcctcttccagcacccattgtatcaagtcccaataccacctctcactgaaggggatgtgctcttcaatgtcaatagtgacataagattcaatccaaaggctgctaccgcagaaaatcccgactggccacatgaggggcccgaagacgagttcctccccaccggagaggcagctgtagatagttaccctaattggctgaagtttcacataggcattaataggtacgaactttacagcagacataaccccgcagttggcgccctccttcaagatttgggtactcaaaaaattacatctgtagcaatgaagagcggaggcactcaacttaaactgataatgacctttcaaaactacggacaggccctgtttaaaccaatgaaacaaactcgtgaacaggagaccccaccagattttttttatttttccgattatgaaaggcataacgctgagattgcagcatttcatctcgatcgtattcttgattttagaagggtgcctcctgtggctggcagactcgtgaacatgacaaaggagattagagacgttaccagggataaaaagttgtggcgcactttcttcatttcacctgctaataatgtgtgtttctatggcgagtgctcttactattgctctacagaacatgctctttgtggcaagccagaccagatagaaggatccctggctgctttccttccagaccttgctcttgcaaagcgtaaaacctggagaaatccctggaggcgttcttatcataaaagaaaaaaggctgaatgggaagtggaccccgactattgtgaggaagtgagacagacacccccttatgatagtagtcacaggttgcttgatgtaatggacatgacaatcttcgactttttgatgggtaacatggacagacaccattacgaaacatttgagaagtttggcaatgagacatttataatacatctcgacaacggacgtggatttggcaagcacagccacgacgagttgtctatcctggtaccccttcagcagtgctgcagaataaggagatcaacctacctgagattgcaactgcttgcccaagaagaacatcgtctgtcactccttatggcagaggcactgagagctgacagagtcgcaccagtgctttttcagcctcatctggaggctttggatcgtcgcctgaggatcgtgcttagagctgtcggcgattgcgtggaaaaagacgggttgcactctgtggtggaggatgatctcggcccagaacaccgcgcagctgcagggaga

SEQ ID NO: 911 - DNA, 1758 bp, synthetic construct
  source 1..1758: mol_type = other DNA
atgaaaatgattctggtcagaagattcagagttcttatcctgatggccttcttggctgcatgtgcactgcaccttgtactcgacctccttcccaaactggaaagatcagccgctagaccctctggggaacccggatgttcttgtgctcaacctgcagccgaagccgccgccccaggatgggcccaagcacgcggacatcctgggggcgaacttgaagctgcagcatccgcagccggcgacgcaggttggccaaacaagcacaccttgaggatcttgcaggacttcagttcagatcccagctcaaatttgaccagccactcattggaaaagttgccccccgcagcagaagcagctgaaggcgcacctccaggtcaggacccaggtgtccgcagaccacctgaccctgcacatcgcccattgcctcgtgatcccgggccccgtggtccagtgcttcctcctggattgtctggggacggttcacttctgacccgtttgttccagcaccctctgtatcaggtacccatcccccccttgacagagggagatgtacttttcaatgttaactccgatatcagatttaatcctaaggccgccaccgctgaaaaccctgactggccacatgaagggccagaggatgaattccttcccactggcgaggctgccgtcgactcttatccaaattggctcaagtttcacataggtatcaatagatatgaattgtacagtagacacaaccctgcagtcggagctcttcttcaagatttgggcactcagaagatcaccagcgtagccatgaaaagtggaggaacccagctgaagctcatcatgacattccagaattacggccaagctcttttcaaacctatgaaacaaactagagagcaagagaccccaccagactttttttacttttccgattacgaacgccataatgcagaaatagcagcttttcacctcgatcgcatccttgatttccgtcgcgtgcctcccgttgccggacgtctggtgaatatgaccaaagaaattagggacgtaacacgtgataagaagttgtggcgcactttctttatctcccccgccaataacgtttgtttttatggcgagtgttcttattattgtagtactgagcacgcattgtgtgggaaacctgatcaaatagaagggagtctggccgcatttctgcccgatcttgcacttgcaaaacgcaagacttggagaaatccttggaggagatcttatcacaaaaggaaaaaggccgaatgggaggttgatcctgactactgtgaagaggtccgtcaaacccctccttacgactcatctcacagactgttggacgtaatggacatgacaatatttgacttcttgatggggaacatggataggcaccactacgagacattcgaaaagttcggcaacgagaccttcataatacacttggataatgggagaggcttcggcaagcattcacatgatgaactgagcatcctggttcccctccaacagtgctgcagaataagaagaagtacttatcttagattgcagcttttggcccaagaagaacataggcttagcctgctcatggccgaagcactgcgcgctgatagggtggctcctgtactctttcaacctcaccttgaggccttggacagaagactgcgcatcgttttgcgtgccgtgggtgattgtgtcgagaaagatggacttcatagcgttgtcgaagatgacctgggtccagagcaccgcgcagctgctggtcgc

SEQ ID NO: 912 - DNA, 1758 bp, synthetic construct
  source 1..1758: mol_type = other DNA
atgaagatgattttggtacgtcgtttccgtgtccttattttgatggcctttcttgcagcatgtgcccttcatcttgtgttggacctgctccctaaactcgaacgtagcgccgcaaggccctcaggcgagccaggatgcagttgtgcacaaccagctgccgaggctgctgcccccggatgggcacaggccagaggtcatcctgggggcgaacttgaggccgccgctagtgccgcaggagatgccggttggccaaacaagcacacccttaggattctgcaagatttttccagtgacccttcttcaaacctcacttcacactcccttgagaaattgccaccagccgctgaagcagcagaaggagctccaccaggtcaagatcctggtgtgcgtcgccctcctgaccctgcccacaggcctctgccccgtgatccaggacccaggggccctgttcttcctccaggactgagcggtgatgggtctctccttacaagactgtttcaacacccattgtatcaagtgcctatccccccacttactgagggggacgttttgttcaacgtcaattctgatatccgttttaaccctaaagccgctaccgccgagaaccctgactggcctcacgaaggtcctgaagatgagtttttgcctactggagaagctgcagtagactcataccccaactggctgaagttccatatcggtataaatcgttatgagctctactcacgccacaaccctgcagtgggcgctttgctgcaggatttggggactcagaaaatcacatccgtcgcaatgaagagtggcggtactcaactgaagctgataatgactttccagaactatggtcaggcactcttcaaacctatgaagcagaccagggaacaagaaaccccaccagacttcttctactttagcgattacgagcgtcataacgctgaaattgctgctttccacctcgacagaatcctcgattttcgtcgtgtacccccagtcgcaggtcgccttgtgaatatgaccaaggaaattagggacgtgacacgtgataagaaattgtggcgtacctttttcattagtcccgctaacaacgtctgtttctatggagaatgcagttactattgttccactgaacatgctctttgcgggaagccagaccaaatagagggttccttggctgcctttttgcctgatctcgctctggctaaaaggaagacatggagaaatccttggaggcgttcataccataagcgtaagaaagccgagtgggaggtagacccagactactgcgaagaggtccgccaaacccctccatatgatagttctcatcgcctcctggacgtaatggatatgaccattttcgatttcctgatgggtaacatggatagacaccattacgagacatttgagaaattcggcaacgaaaccttcatcattcaccttgacaacggccgtggtttcgggaaacatagccatgatgaattgtctatactcgtaccccttcagcagtgctgtcgtattagacgtagtacttacctgaggctccaactgctcgctcaggaggaacatagactctccttgcttatggctgaggctctcagagccgatcgcgtagctcccgtgctgtttcagccccatctcgaggccttggataggaggttgagaatagtactgagagccgtgggagactgcgtagaaaaagacggcttgcatagcgtcgtggaagacgaccttggacctgaacacagagctgccgcagggagg

SEQ ID NO: 913 - DNA, 1758 bp, synthetic construct
  source 1..1758: mol_type = other DNA
atgaaaatgatccttgttcgccgtttccgtgtcttgatccttatggctttcctggcagcctgtgctcttcaccttgtccttgaccttctgcccaagcttgaacgttccgctgctcgtccatcaggggagcctggctgttcatgcgctcaaccagcagcagaggccgccgcaccaggttgggcccaagcaagagggcacccagggggtgaacttgaagctgccgcatcagcagccggagacgctggttggcctaataagcatactctcagaatactgcaggatttctcatcagatccaagcagcaatctcacttctcattcactcgagaagcttccccctgcagctgaggccgcagagggcgctcctccaggacaagatccaggagtgagaagacctccagatcctgcccacagaccccttccccgtgaccctgggcctcgtggtcccgtattgccccccggcctgagtggagatggaagcctccttactaggttgttccaacatccattgtatcaggtcccaataccaccccttactgagggcgatgtgttgttcaatgtgaactccgatataagatttaacccaaaagcagctaccgccgagaatcccgattggccccatgaaggccctgaggacgaatttttgccaaccggggaggctgcagtggacagctaccccaattggctgaagttccacatcggtataaatagatacgaactgtactctagacataaccccgctgtaggcgctctcctccaagacttgggcacccagaaaattacaagtgtggctatgaagtcaggcggtactcaacttaagctgattatgacttttcaaaactacggccaggccctgtttaagcccatgaagcaaactagagaacaagaaacccctcccgatttcttttatttcagtgattatgagaggcacaatgctgagattgcagccttccatcttgacagaatcctcgatttcagaagagttccacccgtcgctggcagacttgtgaatatgactaaagaaatcagggatgttactcgtgataaaaaattgtggcgcacctttttcatatcacctgcaaataacgtttgtttttatggcgagtgctcatattattgtagtacagaacatgcactgtgtggtaaaccagaccagattgaagggagtcttgcagcctttctccctgatctcgcccttgccaaaagaaagacatggagaaatccttggcgccgttcttatcacaagaggaaaaaggccgagtgggaggtagacccagactactgcgaagaagtacgtcaaacccccccttacgacagctcacacagattgctggacgtgatggacatgaccatatttgactttcttatgggaaatatggatagacaccactatgagaccttcgagaaatttggcaacgaaacatttataatccatcttgataatggtaggggctttggcaaacatagccatgacgagctgtccattcttgttcctctgcagcagtgctgcagaattagaaggtctacttatttgagacttcagttgctggctcaagaggaacataggctcagccttctgatggccgaggccctcagagcagaccgtgtggcacctgtgctttttcagccacacctcgaggcacttgatagacgccttaggatcgtgttgagggccgttggagattgcgtcgaaaaagatggcctccatagcgtggttgaggacgatctcggacccgaacatcgtgccgcagctgggcgt

SEQ ID NO: 914 - DNA, 1758 bp, synthetic construct
  source 1..1758: mol_type = other DNA
atgaaaatgattctggtgcgccgcttccgtgtactgatccttatggcctttttggcagcttgcgctcttcacttggtattggatttgctgccaaagcttgagagaagcgctgctcgtccatccggggaaccaggctgcagttgtgctcaacctgctgccgaggccgccgcacccggctgggctcaagcaagaggtcatccaggcggggaactcgaagccgctgcaagtgccgcaggagatgctggatggcccaacaagcacacactgagaattttgcaagacttttcatcagatccttcatctaatcttactagccactccctcgagaagctgccccccgctgctgaggctgcagaaggagcccccccagggcaggatcctggagtaaggaggccaccagaccctgcccatagaccccttccacgcgaccccggtcctcgtggaccagtccttccacccggactctcaggcgatggaagtctcctcacccgtctgtttcagcatcccctttaccaagtccctatcccccctctgacagagggcgatgtgctttttaacgtcaattcagatatccgtttcaatccaaaggctgctaccgctgagaatcctgactggccccacgagggccccgaagacgagtttcttcccactggcgaagccgcagttgacagctaccctaattggctgaagttccacataggtataaatcgctacgaactctatagccgtcacaatccagcagtgggagccctgctccaagatttgggcacccaaaaaataacatccgtagcaatgaagagcggcggcacccagttgaagctcataatgacatttcagaattacgggcaagctttgttcaaacccatgaagcaaaccagagagcaagagactccaccagacttcttttacttttctgactatgagaggcacaatgcagaaatcgctgcatttcaccttgatagaattctcgattttcgcagggtcccacctgtcgccgggcgcttggtgaatatgactaaagagattcgtgatgtaactcgtgataagaaattgtggaggactttcttcatctcccccgctaataacgtttgcttttatggtgaatgtagctattattgctcaacagagcacgcattgtgtggaaaaccagaccaaattgagggctctctcgccgcatttctgcctgatcttgcactcgcaaaaaggaagacatggcgcaacccctggcgcagaagctatcacaagcgtaagaaggccgaatgggaggttgaccccgactattgcgaagaagtacgccagaccccaccctacgacagttctcatcgtctgttggacgttatggacatgaccatattcgactttcttatgggtaacatggatcgtcatcactatgagactttcgaaaaatttgggaatgagaccttcattatacacctggacaatggccgcggtttcggaaagcacagtcacgatgagctttccattttggtacccctccaacaatgttgccgtataaggaggagtacatacttgcgtctccagctgcttgctcaagaggagcacaggctctccctgctgatggccgaggcacttagagctgacagggttgctcctgtccttttccagccccaccttgaggctcttgacaggagattgagaatagtcctgcgtgctgtcggggattgtgttgaaaaagatggtcttcatagtgtagttgaggatgaccttggtcccgaacatcgtgccgctgctggtcgc

SEQ ID NO: 915 - DNA, 1758 bp, synthetic construct
  source 1..1758: mol_type = other DNA
atgaaaatgatactggtacgcagatttagggttctgatactcatggctttcctggctgcctgcgctttgcatcttgttctcgatttgctgcctaaacttgagagatccgccgctcgtcctagcggggagcccgggtgcagctgtgctcagcctgctgctgaagcagctgctcccggctgggctcaggccagaggtcaccccggaggcgaacttgaggctgccgccagcgcagcaggtgatgctggctggcccaacaaacatactctgcgcattcttcaggacttttcatctgacccatctagcaacctcacctcacacagccttgaaaaactccccccagctgcagaggccgccgaaggtgctccacctggccaagatcccggtgtacgtcgcccccctgatccagcacaccgcccacttcccagagatcctggaccacgtggtccagtgctccctccagggctgtccggcgacggctctctcttgactcgtctcttccagcatcccctttaccaggttcctatccccccactgacagagggcgacgttctcttcaacgtgaattctgacatacgctttaatccaaaagctgcaacagctgagaatccagattggccccacgaaggtcccgaagacgaattcttgcccacaggcgaggccgcagttgatagctatcccaactggttgaaattccatatcggaattaacagatacgaattgtactctcgccataaccctgcagtgggggcacttttgcaggacctgggcacccagaagatcacctctgtagcaatgaaatcaggagggacccagctgaagttgattatgacttttcagaactacggtcaggccctgttcaagcccatgaagcagacaagggagcaagagactccacctgattttttttactttagcgattacgaacgtcacaatgcagagatcgccgcatttcatctcgatcgtatcctggatttcagacgtgtacctccagttgccggacgcctggtgaacatgaccaaagagattagagacgtaacacgcgacaaaaaattgtggcgcacattttttatttctcctgccaacaatgtttgtttctacggtgagtgctcctactactgtagcaccgaacatgctttgtgtggtaaacctgatcaaatagagggttccttggctgcctttcttcctgatctggctcttgctaagcgcaagacttggcgtaacccttggcgcagatcttaccacaagagaaagaaagccgagtgggaggtggatccagattattgtgaggaagtcaggcaaactccaccatacgacagtagtcatcgtctcttggatgtaatggacatgaccatctttgattttttgatgggtaacatggacagacaccattacgaaacctttgagaagttcggtaatgaaactttcattattcaccttgacaatggccgcgggttcggcaagcacagtcatgatgagctttctatccttgttcctcttcaacagtgttgtaggatcagacgcagcacctatctgaggttgcaattgctcgcccaggaggagcacaggctgtctttgctcatggctgaggcacttagagccgaccgcgtagctccagtgctgttccaaccccacttggaggcactggaccgcaggctcaggatcgtattgcgtgctgtaggggactgcgttgaaaaggacggcctccatagtgttgtggaagacgacttgggccctgagcacagggcagcagccggaagg

SEQ ID NO: 916 - DNA, 1758 bp, synthetic construct
  source 1..1758: mol_type = other DNA
atgaaaatgattctggtccgtcgttttagagtgttgatactcatggccttcctcgcagcatgtgctttgcatctcgtcctggaccttctccccaaactcgaacgctccgctgcaaggccctcaggtgaacctggatgtagttgcgctcagccagcagctgaggctgccgctccaggctgggcccaggcacgtggtcacccaggtggcgagttggaagctgccgctagcgctgctggggatgctgggtggcctaataagcacacccttaggattctgcaggatttcagtagcgatccctccagtaatttgacatcacattcacttgagaagctccccccagctgctgaggccgctgagggagctccacctggtcaagatcctggggtaaggagacccccagatccagcccacaggcccctccccagggatcccggccctcgtggccctgttcttccccccggcttgtctggagatggaagccttttgactaggcttttccagcacccactttatcaagtgcccattccacctttgacagaaggggacgtcctgtttaatgtcaactctgatatacgttttaatccaaaggctgctaccgccgagaaccctgattggccccatgaaggtcccgaggacgaatttctgccaaccggtgaggccgctgtagactcttatcccaactggttgaaatttcatatagggattaatcgttatgaactctatagtaggcataaccctgctgtgggagctctccttcaagacctcgggacccagaaaataacctctgtcgcaatgaaaagcggcggcacccagttgaagttgataatgacattccagaattacggccaagcactttttaagcccatgaagcagacccgcgaacaggagaccccaccagactttttttacttttctgattacgagagacataatgctgaaatcgctgctttccatttggatcgtattttggattttagacgtgtacctcccgtcgccggacgtctggtgaatatgactaaagaaattcgtgatgtaacaagggataagaaactttggagaactttttttatttcacctgccaacaacgtctgtttctacggggagtgtagctattattgttccaccgaacatgcattgtgcgggaagcccgatcagatagaggggtcactcgctgccttcttgcctgacctggcattggcaaaacgtaagacttggagaaacccctggagacgcagttaccacaagcgtaaaaaggcagagtgggaagtggacccagattattgcgaagaagtgcgccagactcctccttatgacagtagtcatcgcttgttggacgtcatggacatgaccatcttcgacttcctcatgggtaatatggaccgtcaccactacgagactttcgagaagtttggtaatgaaacctttataatccatctggataatggtcgtggtttcggcaagcattcccacgacgagttgagcattctcgtgccactccagcagtgttgtagaatcaggaggagcacatacctgaggttgcaattgcttgctcaagaagagcaccgcttgagcttgctcatggcagaggcactcagagcagatagggtagccccagtattgtttcaaccacacctggaagctctggaccgccgtcttcgtatagtactgagagcagtcggcgactgcgtagagaaggacgggttgcacagtgttgtcgaagacgatctcggtccagagcatcgtgccgccgccggaagg

SEQ ID NO: 917 - DNA, 1758 bp, synthetic construct
  source 1..1758: mol_type = other DNA
atgaagatgatcctggtaaggcgcttccgtgttctgatactgatggcttttctcgccgcctgcgctctccacctggtactcgaccttctgcccaaattggaaaggagtgccgctcgcccaagcggtgagccagggtgtagttgcgctcagcccgctgctgaggctgcagcacctggctgggcacaagcaagagggcatccaggtggcgagttggaagccgctgcttcagcagctggcgacgctggctggccaaataaacacacattgcgtatactccaggacttttccagcgatccaagtagtaatcttacatcacactcactcgagaaacttccaccagccgctgaggcagctgaaggagcaccccccggacaggacccaggggttcgtcgtcctccagaccctgcccataggcctttgcctagagaccccggcccaagagggcccgtgcttcccccaggtttgagtggtgatggatcccttttgacaagacttttccaacacccactttatcaagtacccatacctcctcttacagaaggcgacgtgctcttcaacgtaaatagtgacatcaggtttaaccctaaagcagccacagcagaaaaccctgactggccccacgagggtcctgaggatgagttcctgccaactggggaggctgctgtagactcttatcctaactggctcaagttccatatagggatcaataggtacgagctctattctcgtcacaatccagccgtgggggcactgctccaagatttgggtacacaaaagataacttccgttgcaatgaagtcaggcggtacacaattgaagctgattatgacttttcaaaactatggtcaagctttgtttaagccaatgaagcagactcgtgagcaagagactcctcctgactttttttacttttctgattatgaaagacacaatgcagaaattgcagcctttcaccttgatcgcatacttgattttagacgtgtcccacccgtcgctggaagactcgtgaatatgaccaaagagattagggacgtaactagagataagaaactttggagaacattttttataagtcctgctaacaacgtatgtttctatggagagtgctcatattattgctctaccgagcatgctttgtgcgggaagccagaccaaatcgagggcagccttgcagccttcctgccagaccttgctcttgccaagagaaaaacctggcgcaatccttggaggcgcagttatcataagaggaagaaggccgaatgggaggtagatcccgactactgtgaggaagtcaggcaaacacccccctatgactccagtcatcgcctcctcgatgtaatggatatgaccatttttgatttcctcatgggtaatatggatcgccatcattacgagacatttgagaaatttgggaacgaaacttttatcatacatttggacaatgggagggggttcggtaagcatagccatgatgagttgtctatactcgtccctctgcagcaatgttgtagaattaggcgttctacttatttgcgccttcaactgcttgcccaagaggaacatagactttctcttctgatggctgaagcactgcgcgcagaccgtgttgctcctgtattgttccaacctcaccttgaggccttggatcgtcgccttagaatcgttttgagggctgttggagactgtgtcgagaaagacggtctccatagcgtagtcgaggatgacttggggccagaacatagagctgctgccgggcgt

SEQ ID NO: 918 - DNA, 1758 bp, synthetic construct
  source 1..1758: mol_type = other DNA
atgaaaatgatattggttagacgctttcgcgtactcatcttgatggcttttcttgctgcctgcgccttgcacttggtgctcgatcttctccccaaattggaaaggagtgccgctaggccttctggggaaccaggctgttcatgtgcacaacctgctgcagaggctgccgctccaggctgggcacaggcccgtgggcatccaggtggggaattggaagccgctgccagcgcagccggggacgccggttggcccaataaacatacactgcgtatcttgcaagatttctcctctgacccaagttctaatttgacaagtcactcactcgaaaagcttcctccagccgctgaagcagccgaaggagccccccctggacaggatccaggggtgaggcgcccccctgatcccgcccaccgtcctttgcctcgtgatcccggccctcgtggccccgtgctgcctccaggcctctcaggcgatggcagtttgctcactcgcttgtttcagcatcctttgtatcaagtaccaataccacctttgacagagggcgatgttcttttcaacgtgaactccgatattcgtttcaatcctaaagcagcaacagcagaaaatccagactggccacacgaaggccctgaagatgagtttcttcctacaggagaagccgccgttgacagttatccaaattggttgaagttccacataggaattaatcgttatgagctgtattcaagacataatcccgctgtcggtgccttgctccaagacttgggaacacagaagataacatctgtcgccatgaagtcaggtgggacccagcttaagctcataatgactttccaaaattatggccaggcactgtttaagcctatgaagcagacccgcgagcaagagacaccacccgatttcttctacttttctgattatgagcgccacaatgccgaaatcgcagcctttcatctggatcgcatactcgactttcgcagagtgcctcccgttgcagggaggttggtcaacatgacaaaagaaataagggacgttacccgtgacaagaaactctggaggacatttttcatttctccagctaataacgtctgcttctatggagagtgtagctattactgttcaactgaacacgccttgtgtggtaaacccgatcaaatcgaaggatcactcgcagcatttttgccagatcttgcacttgccaaacgtaagacatggcgcaatccttggagaaggtcctaccataaacgtaaaaaggccgaatgggaggtcgacccagattactgtgaggaagttagacagaccccaccctatgacagctcacatagactgcttgatgtaatggacatgaccattttcgacttcctcatgggaaacatggataggcatcattatgagactttcgaaaaattcggcaatgaaacattcattattcatttggacaacggcagaggattcggtaagcactctcacgacgaactgagtatattggtacctttgcaacagtgctgtcgcattcgcaggtcaacctatctccgcctccagctcctcgcccaagaggagcacagactgagtttgctcatggcagaagcacttcgcgctgatcgcgtagctcctgtactgttccagccccaccttgaggcactggataggaggctgcgtatagttctgcgcgcagtgggggattgcgtagaaaaggacgggttgcatagtgtggtcgaagacgacctgggtcctgagcacagagcagcagctggaagg

SEQ ID NO: 919 - DNA, 1758 bp, synthetic construct
  source 1..1758: mol_type = other DNA
atgaaaatgatccttgttcgtcgctttcgtgtgctgattctgatggccttccttgccgcctgtgcactccacctcgtattggatttgctccctaagctcgagaggtctgcagcacgtccaagcggagaaccaggatgctcatgcgctcaaccagcagcagaggctgccgctcctggctgggcccaagcacgtggtcacccaggtggcgaattggaagcagctgcctcagccgctggcgacgcaggctggccaaataaacacacactgcgtatactccaggatttctccagtgacccttcttccaaccttaccagtcatagcttggagaaactgcctccagctgccgaagctgctgagggtgctcccccaggacaagaccctggtgtgaggcgtcctcccgaccctgcccacaggccactgcctagggaccctgggcccagagggccagtattgccacctgggctgagcggagatggttctcttttgactcgtcttttccaacaccccctgtatcaggtccccatcccccctctcactgagggtgatgtactcttcaacgtaaacagtgatatacgtttcaatccaaaagcagctaccgctgaaaatcccgactggccccatgagggccctgaggacgagttcctccccacaggtgaggctgccgtggattcctatcccaactggcttaaatttcacataggaattaataggtatgaattgtactctaggcataaccctgcagttggggccctgcttcaggaccttgggactcaaaagatcaccagcgtggccatgaaaagcggcggcacacaattgaagttgatcatgactttccaaaactatggccaagcactgtttaagcctatgaagcagactcgcgagcaagagaccccaccagactttttctacttttcagactacgaaagacataacgcagaaatcgctgctttccacctggaccgtatcctcgatttcaggagggttcccccagtagcaggaaggctcgtgaatatgactaaggaaattagagacgtgactcgcgacaaaaagttgtggcgtaccttcttcatttcacccgccaataacgtgtgcttttacggcgagtgcagttactactgcagcacagaacacgctctgtgtggtaaacctgaccaaatagagggatccctggctgcttttttgcccgatctggcacttgccaaaagaaaaacttggcgtaatccctggcgtagatcttatcataagcgtaaaaaagcagaatgggaagtggacccagactattgtgaagaggtcagacagactccaccatatgactcatcccacagactcctggacgttatggacatgactatatttgacttccttatggggaacatggataggcatcattacgagacttttgaaaaatttggcaacgaaactttcataatccatttggataatggtaggggatttggtaagcattctcatgacgaacttagcattttggtccctcttcagcagtgctgtcgcatcagacgcagtacctatctgaggttgcaattgctggcccaagaggagcaccgccttagtttgttgatggcagaggcacttagggctgacagggtcgcaccagtcctgttccagccacaccttgaagccctcgataggcgtttgcgtatcgtactgcgtgctgtgggagactgtgtagaaaaggacggactgcatagtgtcgtggaggacgatcttggccctgagcatcgtgccgctgcagggcgc

SEQ ID NO: 920 - DNA, 1758 bp, synthetic construct
  source 1..1758: mol_type = other DNA
atgaagatgatcctcgtccgtcgctttagggtacttatactcatggcatttttggccgcttgtgccctgcacctggttctcgatttgcttccaaaattggaaaggtccgcagctaggcctagtggagaaccaggctgctcctgcgcacagcccgccgcagaggctgccgctccaggctgggcccaagcaagagggcatcccgggggagaacttgaggccgcagcaagcgcagcaggagatgcagggtggccaaataagcacacactgcgtattcttcaggacttttcctccgatccaagtagcaacctcactagccattctctggaaaagcttccaccagcagctgaagctgctgaaggtgcacctcccggtcaagatccaggagttagaaggccacctgaccctgcccatcgcccacttcctcgtgaccccggcccccgtggaccagttcttccacctgggcttagtggggatgggagtctccttacacgcctgttccaacaccctttgtaccaggtccccattcccccactgaccgaaggtgatgtccttttcaatgtgaattcagacataagattcaacccaaaggctgccaccgctgaaaaccccgattggccccacgaagggccagaagacgaattcttgccaacaggtgaagccgctgtggatagttacccaaactggttgaagttccacattgggataaacagatatgagctttattctaggcataatcccgccgttggtgccctcctccaggatctgggaacacaaaaaataaccagtgtcgccatgaagagcggcggcacccaattgaaactgatcatgacctttcaaaactacggtcaagcactcttcaagcccatgaaacaaacccgtgagcaagagacaccacctgatttcttttacttctccgattacgagcgtcacaatgctgagatagctgcatttcatcttgacagaattctcgacttcaggcgtgttccacccgtcgctggaagactggtgaacatgaccaaggagatcagagatgtaactcgcgacaaaaaattgtggaggacatttttcataagtcccgctaacaacgtttgcttctacggggagtgtagttactattgtagcaccgagcacgctctttgcggtaaacctgaccaaatcgaggggagcctggcagcttttctgccagatcttgcattggccaagagaaaaacttggagaaacccatggaggagatcctaccataaaagaaaaaaggcagaatgggaagtagatcccgactattgtgaggaggtcaggcagactccaccatacgatagctcccataggttgttggacgttatggatatgacaatcttcgatttccttatgggaaacatggaccgccaccattacgagaccttcgagaaatttggaaatgaaaccttcatcatacatcttgacaatggaaggggatttggcaagcattctcacgatgaactgtcaatcctggtgcccctccaacagtgctgccgcattagacgttctacctatcttcgtctccaattgctggctcaggaagaacatcgtctcagcctgctgatggccgaagctttgcgcgccgacagggtggcaccagtactttttcaacctcacttggaggccctcgaccgccgtttgaggattgtactgagagcagttggtgattgcgtagagaaggatggcctccatagcgtggtcgaagatgatcttggtcccgagcatagagctgccgcaggtcgc

SEQ ID NO: 921 - DNA, 1758 bp, synthetic construct
  source 1..1758: mol_type = other DNA; note = FAM20C wild type
atgaaaatgattctggtgcgcagattccgcgtgctcatcctgatggccttcctggcggcttgcgcgctgcacctcgtgctggatctgctgcccaagctggagcggagcgccgcgcggccctcgggggagcccggctgctcctgcgcgcagcccgcggcggaggcggcggcccccggctgggcccaggcgcgcggacaccccggaggggagctggaggccgcagcctccgccgccggcgacgcgggctggcccaacaagcacacgctgcgcatcctgcaggacttcagctccgacccttcctccaatctcacatcccactcgcttgagaaactgccccccgcagccgaagcggccgagggcgccccgccggggcaggatcctggagtccggcgccccccagatccggctcaccggccgctcccccgcgaccccggcccgcgtggacctgtgctgccccctggcctgagcggggacggctccctcctaaccaggctgttccagcacccactgtaccaggtccccattccacctctaacggagggcgatgtcctcttcaacgtgaacagtgacatcaggttcaaccccaaggcagcgacggcggagaacccagactggccacacgaaggtcctgaggatgaattcctgcccaccggggaggcggccgtggactcctatcccaactggctcaagttccacatcggcatcaaccgatatgagctgtactctagacacaacccagcagtgggggccctgctccaagacctgggcacccagaagatcaccagtgtggccatgaagtccggcggcacacagctcaagctcatcatgaccttccagaactacgggcaggcgctgttcaaacccatgaagcaaacaagggagcaggagacgcctcccgacttcttttacttctccgactatgagaggcataatgcggagatcgccgccttccacctggacaggatcctggatttccgccgggttcctcccgtggccggcaggctagtcaacatgaccaaggagatccgggacgtcacgagggacaagaagctgtggaggaccttcttcatctccccagccaacaacgtctgcttctacggggagtgttcgtactactgctccacagagcacgccctgtgcgggaagccggaccagatcgagggctcgctggccgccttcctgcccgacctggccctggccaaaaggaagacctggcggaacccctggcgacgctcgtaccacaagcgcaagaaggcagagtgggaagtggaccctgactactgcgaggaggtgaggcagacgcccccctacgacagcagccaccgcctcctggacgtcatggacatgaccatcttcgacttcctcatgggaaacatggaccggcaccactatgagaccttcgagaagtttgggaacgagacgtttatcatccacttggacaacgggagagggtttgggaagcactctcacgacgagctgtccatcctggtgcctctacagcagtgctgcaggatccggcggtccacgtacctgcggctgcagctcctggcccaggaggagcaccggctgagcctgctgatggccgaggccctgcgcgcggaccgtgtggcccccgtgctgttccagccacacctggaggcgctggaccggcggctgcgcatcgtgctgcgggcggtcggggactgcgtggagaaggacgggctgcacagtgtcgtggaggacgacctgggccccgagcacagagccgcggctgggagg

SEQ ID NO: 922 - DNA, 1578 bp, synthetic construct
  source 1..1578: mol_type = other DNA
atgcctggcctcaggcgcgataggctcctgactctcctccttcttggggccctcctcgcagcagatctttactttcacttgggtccaagggtccgttccagactccagccacgcgaaaggccccttggctgtccctgtgccaggcgtgccgccagccctgctcccggacccgcaccatcagcaccacgtagggtggaaccttccggcggtggtgatcctggatccaagctgagagctctgtttgctcaccccctctacaatgaaccagaagagccccctcttcttggacctgaagacagtctgttggccggtcctgaggcccttcgttattatcgccgtaaagtggcacgctggaaccgtcgccgcaagatgtacaaagagcaacttaatcttacatcaccagagccccctgtgcagctgcgccaagaggcttcttgggtgcaattccacttgggtatcaatcgccacggactctacccccgcagcagccctgttgtatccaagctgctccaagatatgcgccacttcccaactatttccgctgattattcccaagacgagaaggcactgctcggcgcatgcgactgttcacaaatagtgaaaccttccggtgtccatcttaaactcgtgctccgcttctcagacttcggcaaggctatgttcaaaccaatgcgccaacagcgtgacgaggaaactcctgaggacttcttctattttatagattttcaaaggcataacgctgaaattgcagcatttcacttggatagaatcttggattttaggcgtgttcctcctactgtcgggaggctcgtcaatgtgactagagagattttggaggttactaggaatgaaatacttcaaagcgtgttctttgtctcccccgccaacaatgtgtgtttttttgctaaatgcccctatatgtgcaagacagagtatgcagtgtgcgggtctccacatcttctggagggttcccttagcgcctttctccctagcctgaatctcgccccccgtttctccatgccaagtccatggattagatcttattctctggcaggtagagaagaatgggaggttaatcccttgtattgtgaagcagtaaagcaggcataccctcataattcaagttctagacttctcaatataatagatatggcaatcttcgattttctgattggtaacatggaccgccaccactacgaaatgtttacaaagttcggtgaagacggttttctgatacaccttgataatgctaggggtttcggaagacatagtcacgacgaggtgtccatattggcaccattgtttcaatgttgccgcattaagcgtaaaactctgttgcacttgcagcttctcgcacaagccgactacagactgtccgacgtaatgagggagagcttgcttgaagatcagttgtcaccagttctcacagaacctcacttgcttgctctggatagacgcttgcagacagttcttaggacagttcaagattgtattgaagcacatggtgaacagagcgtcgttgccgatggtccagttgggcaatgggcacccgactcctctcgcgcaaacgccacctct

SEQ ID NO: 923 - DNA, 1578 bp, synthetic construct
  source 1..1578: mol_type = other DNA
atgcccgggttgaggagggataggctcctgacactgctgcttcttggagctcttctggccgccgatctctattttcaccttggtccaagggtgcgcagccgcctccaaccaagggagaggccacttggctgcccatgtgcacgtcgtgcagcatcccctgctcccggccccgcaccttccgctcctagaagggtcgagccctctggtggaggcgatccaggctcaaaactccgcgccctctttgcacaccccctgtacaacgagcctgaagaaccccctcttcttggtcctgaagatagcctcttggctggtcccgaagctttgagatattacagacgtaaggttgcaaggtggaaccgtcgtaggaaaatgtataaagagcaactcaacctcacaagtcccgaacctccagtgcagttgcgtcaagaggcctcttgggttcagtttcaccttggcatcaacagacatggtctgtatccccgtagcagtcctgtcgtgtccaaattgctgcaagacatgaggcactttcccaccatttctgccgattattctcaggacgagaaggccctcctgggcgcctgtgactgcagtcaaatcgtaaaaccttcaggagtgcatttgaagctcgtactcaggttctcagacttcgggaaagcaatgtttaagcccatgagacaacaaagagacgaagagactccagaagacttcttctacttcatagatttccaacgccataacgccgagattgctgcctttcatctcgatagaattctggattttagaagagtgccaccaacagtcggtcgtttggtaaacgtaacaagggagattcttgaggtgacaaggaatgagattttgcaaagcgttttttttgtaagtccagccaataatgtatgcttcttcgcaaaatgcccttatatgtgtaagaccgaatatgctgtatgcggctctccccatcttcttgagggttcacttagcgcttttctgccctcacttaacctggcaccccgtttttccatgcccagtccatggatcagaagttacagtcttgctggtcgtgaagaatgggaagtcaacccactgtattgtgaagctgttaaacaagcatatcctcacaattcttcatcccgtctgctgaatattattgatatggccatatttgattttttgatcgggaacatggatcgtcatcactatgaaatgtttacaaaatttggcgaagacggatttctcatccacctcgataacgcacgtgggtttggccgtcattctcacgatgaagtgagcatccttgcacccttgttccagtgctgccgcattaaacgtaagactctgctgcaccttcagttgcttgcccaagccgactacagactctctgacgtcatgcgtgagagcctgctcgaagaccaattgagccccgtcctcactgagccccatctgttggccttggacaggaggttgcaaaccgttctgcgcaccgtacaggattgtatcgaagcccatggtgaacagagcgtggttgcagatggccctgttggtcaatgggcacctgattcaagtagggcaaacgccacatca

SEQ ID NO: 924 - DNA, 1578 bp, synthetic construct
  source 1..1578: mol_type = other DNA
atgccaggccttcgtcgcgatagactccttactctgctgctgcttggcgcacttctggctgctgacctctactttcacctcgggcccagagtacgctccaggctccagcctagagagagaccacttggttgtccctgtgcccgcagagctgctagtccagcccctggccccgcacccagcgcacctagaagggttgaaccatccggtggtggtgatccaggcagcaagttgcgtgctcttttcgcccaccccctgtataatgagcctgaggagccacctctcctgggacccgaagacagtctgcttgcagggcccgaggcactgcgttactataggcgtaaagtagcccgttggaatcgccgccgtaagatgtataaagaacagctgaacttgactagtccagaaccccctgtccagcttcgccaagaagcatcctgggtacaattccatttgggtataaatcgtcatggcctgtatcctcgtagttctcccgtggttagtaagctgcttcaagacatgaggcatttcccaaccataagcgccgattacagtcaagacgagaaagccctccttggagcttgcgattgttctcaaatagtgaaaccctccggcgtccacctgaagctggtactgcgcttttccgatttcggcaaagcaatgttcaaaccaatgcgccaacagcgcgatgaggagactcccgaggattttttctatttcatagattttcagcgccacaatgctgagatcgccgcattccacttggaccgcattttggactttcgcagagtgcccccaaccgtaggcaggcttgtaaatgtcacacgtgaaattctcgaagtcactcgtaatgaaatcctgcaatccgtctttttcgttagtccagccaacaacgtatgtttctttgccaagtgcccctacatgtgtaaaacagagtacgctgtatgtggatctcctcatctcctcgaagggtccttgagtgcctttctcccatccttgaatttggcaccaaggttctcaatgcccagcccatggatcaggtcttactctctcgccgggagggaggaatgggaggtaaatcctctttactgcgaagccgttaagcaggcatacccccataacagtagtagtcgcttgctgaacatcattgacatggccatctttgactttctcatcggtaatatggaccgccatcattatgaaatgtttactaagttcggtgaagacgggttcctgatccacttggacaacgctaggggttttggaaggcacagccacgatgaagtaagcatattggcacctctcttccaatgttgcaggattaaaagaaaaacactccttcatctgcaactgctcgcccaagccgattacaggcttagtgatgttatgcgcgaatcactcttggaagaccaactctcccctgttctgaccgaaccacatctcctggctctcgatagaaggttgcaaacagtcctgagaactgttcaagattgtatagaagctcacggagaacagtcagtggtagccgacggaccagttggccaatgggccccagacagcagtagagctaacgccacatca

SEQ ID NO: 925 - DNA, 1578 bp, synthetic construct
  source 1..1578: mol_type = other DNA
atgccaggtctcaggagggatcgtcttttgactctgctgctcttgggtgctctgctggcagcagacctgtattttcacttgggccctagggtgcgcagcagattgcaaccacgcgagcgtccactcggctgtccatgtgcacgtcgtgccgcaagtcctgcaccaggaccagctccatccgctccacgtcgcgttgaacctagtggaggaggggatcccggaagtaaattgcgtgccctctttgcccaccctctgtacaacgaacccgaagagcctccattgctcggacccgaggattctttgctggcaggccctgaagccctgcgctactacagacgtaaagttgctcgttggaatcgtaggcgcaagatgtacaaagagcagctcaacctgacatctccagaaccacctgtgcaactccgtcaggaagcctcatgggtccagtttcatttgggcatcaaccgtcatgggttgtatccaagatcatcacctgttgtgagcaaattgctccaggatatgaggcacttccccactatatctgccgattattcacaagatgaaaaggcccttctcggggcttgcgactgtagtcagatagttaagccctcaggcgtgcatcttaagcttgttctccgtttcagcgactttgggaaggccatgtttaaacccatgcgccaacaacgtgacgaagagacccctgaggacttcttctacttcattgatttccaacgccataatgctgaaattgcagcattccatcttgaccgtatacttgactttagacgtgtgccacctactgtgggaagactcgttaatgttacccgcgaaatccttgaggtaacccgtaatgaaattcttcagtctgtattctttgtctctccagctaataatgtatgctttttcgctaagtgtccttatatgtgtaagactgaatacgctgtctgtggttcacctcatcttttggaaggatctttgtccgctttcctcccatctctcaacctcgcaccaaggttcagcatgccctccccctggatcaggtcctattctctcgctggaagggaagagtgggaagttaaccccctttactgtgaggctgtaaagcaggcatacccccataattcctcaagcaggctcctcaatattatcgatatggcaatttttgatttccttatcggtaacatggaccgtcaccactatgagatgttcactaagttcggggaggacggatttctgatccatctggacaatgcaaggggctttggcagacactcacatgatgaagttagtatcctggcacctctgttccaatgctgtagaatcaagcgtaagaccttgctgcatcttcagttgcttgcacaagcagattatcgcctgagtgatgtgatgcgcgaatctttgttggaggatcaactgtcacctgttctcactgagcctcatctcttggctctcgataggaggcttcagaccgtgttgcgtacagtacaagactgcatcgaggcccatggtgagcaatccgttgttgcagacggacctgtagggcaatgggctcccgactcttccagagccaacgccacctca

SEQ ID NO: 926 - DNA, 1578 bp, synthetic construct
  source 1..1578: mol_type = other DNA
atgcccggcttgagaagagaccgtctgctcacactgctccttctgggtgctctcctggccgctgacctttattttcacctcggacctcgtgtgcgctcacgccttcaacccagggagcgtcctctggggtgcccatgtgctagaagagctgcaagccctgcaccaggaccagctccttccgcaccacgtagagttgagccaagcggaggcggcgaccccggatccaagctcagggccctttttgcacaccccctttacaacgagccagaggagccacccttgcttggcccagaggacagcctcttggccggcccagaggctctgagatattaccgcaggaaggttgcccgttggaatcgtcgccgcaagatgtacaaggagcaacttaacctgaccagccccgaacccccagtgcaattgaggcaggaggcttcatgggttcagtttcatctggggatcaaccgccacgggctgtacccacgcagcagtcctgtggtctctaagctgcttcaagatatgcgccattttcctactatatctgccgattattctcaggatgaaaaggctctcctgggcgcatgcgactgctcacagatagtcaaacccagtggagtccacttgaaactcgtactccgcttttccgacttcggcaaagctatgttcaaacctatgaggcagcagcgtgatgaggagacacctgaagattttttctattttatcgactttcaaagacacaatgcagaaattgccgccttccatctcgatcgcatcttggacttccgccgcgtcccccctactgtcgggagactcgtaaatgtgacccgtgaaatccttgaagttactcgtaatgaaatacttcaatccgtattctttgtttccccagcaaacaacgtctgtttctttgccaagtgcccttatatgtgcaagaccgaatatgccgtctgcggaagtccacacctgcttgaagggtcccttagtgctttccttcccagtctgaatctcgccccacgtttttcaatgccctcaccatggattagatcatacagtttggccggacgcgaagagtgggaggtgaaccctttgtactgcgaagctgtcaagcaagcctatccacataattcaagcagtcgcctgttgaatatcattgatatggccatcttcgactttctcatcggaaacatggataggcaccattacgagatgttcactaagttcggcgaggatggtttcttgatacatctcgacaatgcaagaggattcggcaggcattctcacgatgaagtttctatcctggcacccctctttcagtgctgccgcattaagaggaaaactttgctccatcttcaacttctggcccaagctgattatcgcctttccgatgtgatgagggagagcctgcttgaagatcaacttagtcctgtattgactgagccccaccttttggctctggatcgtaggttgcagacagtactgcgcactgtgcaggactgtatagaagcacacggggagcaaagcgttgtggctgacggacccgttggtcaatgggcccccgattcttccagggcaaacgcaacatca
